(19) United States
(12) Patent Application Publication
(10) Pub. No.: US 2023/0313185 A1
(43) Pub. Date: Oct. 5, 2023

(54) METHODS FOR THE TREATMENT OF NUCLEOTIDE REPEAT EXPANSION DISORDERS ASSOCIATED WITH MSH3 ACTIVITY

(71) Applicant: Triplet Therapeutics, Inc., Cambridge, MA (US)

(72) Inventors: Nessan Anthony BERMINGHAM, Boston, MA (US); Brian R. BETTENCOURT, Groton, MA (US); Peter Edward BIALEK, Littleton, MA (US)

(21) Appl. No.: 17/998,085

(22) PCT Filed: May 7, 2021
(86) PCT No.: PCT/US2021/031428

§ 371 Date: Nov. 7, 2022

Related U.S. Application Data
(60) Provisional application No. 63/022,134, filed on May 8, 2020.

(51) Int. Cl. C12N 15/113; A61P 25/28; A61K 31/713

(52) U.S. Cl. CPC C12N 15/113; A61P 25/28; A61K 31/713; C12N 2310/531; C12N 2310/14

(57) ABSTRACT

The present disclosure features useful compositions and methods to treat repeat expansion disorders (e.g., trinucleotide repeat expansion disorders), in a subject in need thereof. In some aspects, the compositions and methods described herein are useful in the treatment of disorders associated with MSH3 activity.

### CROSS-REFERENCE TO RELATED APPLICATION

[0001] This application claims priority to U.S. Provisional Application No. 63/022,134, filed on May 8, 2020, which is incorporated herein by reference in its entirety.

### INCORPORATION BY REFERENCE OF SEQUENCE LISTING

[0002] The content of the electronically submitted sequence listing in ASCII text file (Name 4398_026 PC02_Seqlisting_ST25; Size: 611,414 Bytes; and Date of Creation: May 7, 2021) filed with the application is incorporated herein by reference in its entirety.

### BACKGROUND

[0003] Nucleotide repeat expansion disorders (e.g., trinucleotide repeat expansion disorders) are genetic disorders caused by nucleotide repeat expansions (e.g., trinucleotide repeats). Nucleotide repeat expansions (e.g., trinucleotide repeat expansions) are a type of genetic mutation where nucleotide repeats in certain genes or introns exceed the normal, stable threshold for that gene. The nucleotide repeats (e.g., trinucleotide repeats) can result in defective or toxic gene products, impair RNA transcription, and/or cause toxic effects by forming toxic mRNA transcripts.

[0004] Nucleotide repeat expansion disorders (e.g., trinucleotide repeat expansion disorders) are generally categorized by the type of repeat expansion. For example, Type 1 disorders such as Huntington's disease are caused by CAG repeats which result in a series of glutamine residues known as a polyglutamine tract, Type 2 disorders are caused by heterogeneous expansions that are generally small in magnitude, and Type 3 disorders such as fragile X syndrome are characterized by large repeat expansions that are generally located outside of the protein coding region of the genes. Nucleotide repeat expansion disorders (e.g., trinucleotide repeat expansion disorders) are characterized by a wide variety of symptoms such as progressive degeneration of nerve cells that is common in the Type 1 disorders.

[0005] Subjects with a nucleotide repeat expansion disorder (e.g., a trinucleotide repeat expansion disorder) or those who are considered at risk for developing a nucleotide repeat expansion disorder (e.g., a trinucleotide repeat expansion disorder) have a constitutive nucleotide expansion in a gene associated with disease (i.e., the nucleotide repeat expansion is present in the gene during embryogenesis). Constitutive nucleotide repeat expansions (e.g., trinucleotide repeat expansions) can undergo expansion after embryogenesis (i.e., somatic nucleotide repeat expansion). Both constitutive nucleotide repeat expansion and somatic nucleotide repeat expansion can be associated with presence of disease, age at onset of disease, and/or rate of progression of disease.

### BRIEF DESCRIPTION OF DRAWINGS

[0006] FIG. 1 shows the dose response curve for dsRNA of SENSE OLIGO NO: 156/ANTISENSE OLIGO NO: 157 tested at 10 nM and 0.5 nM.

[0007] FIG. 2 shows the dose response curve for of SENSE OLIGO NO: 906/ANTISENSE OLIGO NO: 907 tested at 10 nM and 0.5 nM.

[0008] FIG. 3 shows the dose response curve for dsRNA of SENSE OLIGO NO: 968/ANTISENSE OLIGO NO: 969 tested at 10 nM and 0.5 nM.

[0009] FIG. 4 shows the dose response curve for dsRNA of SENSE OLIGO NO: 1392/ANTISENSE OLIGO NO: 1393 tested at 10 nM and 0.5 nM.

[0010] FIG. 5 shows the dose response curve for dsRNA of SENSE OLIGO NO: 1874/SEQ ID NO: 1875, tested at 10 nM and 0.5 nM.

[0011] FIG. 6 shows the dose response curve for dsRNA of SENSE OLIGO NO: 1366/ANTISENSE OLIGO NO: 1367, tested at 10 nM and 0.5 nM.

[0012] FIG. 7 shows the non linear regression curves depicting mean, standard deviation, and RQ values for each the dsRNA shown, at ten concentrations. (See Example 7.)

[0013] FIG. 8A shows the dose response curve for dsRNA of SENSE OLIGO NO: 420/ANTISENSE OLIGO NO: 421 at ten concentrations. (See Example 7.)

[0014] FIG. 8B shows the dose response curve for dose response curve for dsRNA of SENSE OLIGO NO: 1302/ANTISENSE OLIGO NO: 1303 at ten concentrations. (See Example 7.)

[0015] FIG. 8C shows the dose response curve for dsRNA of SENSE OLIGO NO: 550/ANTISENSE OLIGO NO: 551 at ten concentrations. (See Example 7.)

[0016] FIG. 8D shows the dose response curve for dsRNA of SENSE OLIGO NO: 672/ANTISENSE OLIGO NO: 673 at ten concentrations. (See Example 7.)

[0017] FIGS. 9A-9I show the IC₅₀ analysis for the target knock down measured by qPCR for siRNAs with highest activity in the dual-dose screen. The X-axis represents the concentration of siRNA transfected and the Y-axis represents the relative MSH3 target remaining. (See Example 8.)

[0018] FIG. 9A shows the IC₅₀ analysis for the target knock down measured by qPCR for siRNA of SENSE OLIGO NO: 1366/ANTISENSE OLIGO NO: 1367.

[0019] FIG. 9B shows the IC₅₀ analysis for the target knock down measured by qPCR for siRNA of SENSE OLIGO NO: 1874/ANTISENSE OLIGO NO: 1875.

[0020] FIG. 9C shows the IC₅₀ analysis for the target knock down measured by qPCR for siRNA of SENSE OLIGO NO: 388/ANTISENSE OLIGO NO: 389.

[0021] FIG. 9D shows the IC₅₀ analysis for the target knock down measured by qPCR for siRNA of SENSE OLIGO NO: 392/ANTISENSE OLIGO NO: 393.

[0022] FIG. 9E shows the IC₅₀ analysis for the target knock down measured by qPCR for siRNA of SENSE OLIGO NO: 402/ANTISENSE OLIGO NO: 403.

[0023] FIG. 9F shows the IC₅₀ analysis for the target knock down measured by qPCR for siRNA of SENSE OLIGO NO: 1302/ANTISENSE OLIGO NO: 1303.

[0024] FIG. 9G shows the IC₅₀ analysis for the target knock down measured by qPCR for siRNA of SENSE OLIGO NO: 648/ANTISENSE OLIGO NO: 649.

[0025] FIG. 9H shows the IC₅₀ analysis for the target knock down measured by qPCR for siRNA of SENSE OLIGO NO: 656/ANTISENSE OLIGO NO: 657.

[0026] FIG. 9I shows the IC₅₀ analysis for the target knock down measured by qPCR for siRNA of SENSE OLIGO NO: 832/ANTISENSE OLIGO NO: 833.

[0027] FIG. 10 shows the fold change in MSH3 expression relative to a luciferase control from four plates. The X-axis represents the concentration of siRNA transfection on different plates and the Y-axis represents the percentage of target remaining.

### SUMMARY OF THE DISCLOSURE

[0028] The present disclosure features useful compositions and methods to treat nucleotide repeat expansion disorders (e.g., trinucleotide repeat expansion disorders) e.g., in a subject in need thereof. In some aspects, the compositions and methods described herein are useful in the treatment of disorders associated with MSH3 activity.

[0029] Some aspects of this disclosure are directed to a double-stranded ribonucleic acid (dsRNA), wherein the dsRNA comprises a sense strand and an antisense strand, wherein the antisense strand is complementary to at least 15 contiguous nucleobases of an MSH3 gene, and wherein the dsRNA comprises a duplex structure of between 15 and 30 linked nucleosides in length.

[0030] In some aspects, this disclosure is directed to a dsRNA for reducing expression of MSH3 in a cell, wherein the dsRNA comprises a sense strand and an antisense strand, wherein the antisense strand is complementary to at least 15 contiguous nucleobases of an MSH3 gene, and wherein the dsRNA comprises a duplex structure of between 15 and 30 linked nucleosides in length.

[0031] In some aspects, the dsRNA comprises a duplex structure of between 19 and 23 linked nucleosides in length.

[0032] In some aspects, the dsRNA further comprises a loop region joining the sense strand and antisense strand, wherein the loop region is characterized by a lack of base pairing between nucleobases within the loop region.

[0033] In some aspects, the region the sense or antisense strand is complementary to is at least 15 contiguous nucleotides of an MSH3 gene corresponding to a sequence of reference mRNA NM 002439.4 at one or more of positions 566-589, 678-701, 875-989, 1019-1088, 1370-1393, 1466-1569, 1721-1849, 1879-2038, 2086-2171, 2783-2806, 2847-2922, 3043-3119, 3241-3314, 3330-3353, or 3701-3792 of the MSH3 gene.

[0034] In some aspects, the region the sense or antisense strand is complementary to is at least 15 contiguous nucleotides of an MSH3 gene corresponding to a sequence of reference mRNA NM 002439.4 at one or more of positions 876-989, 1019-1088, 1370-1393, 1889-1938, or 3241-3314 of the MSH3 gene.

[0035] In some aspects, the region the sense or antisense strand is complementary to is at least 15 contiguous nucleotides of an MSH3 gene corresponding to a sequence of reference mRNA NM 002439.4 at one or more of positions 876-989, 1019-1088, 1370-1393, 1466-1569, 1756-1849, 1879-2038, 2086-2171, 2783-2806, 2847-2922, 3043-3119, 3241-3314, 3330-3353, or 3701-3792 of the MSH3 gene.

[0036] In some aspects, the region the sense or antisense strand is complementary to is at least 15 contiguous nucleotides of an MSH3 gene corresponding to a sequence of reference mRNA NM 002439.4 at one or more of positions 678-701, 875-989, 1019-1088, 1370-1393, 1466-1569, 1721-1849, 1879-2038, 2086-2171, 2783-2806, 2847-2922, 3043-3119, 3241-3314, 3330-3353, or 3701-3792 of the MSH3 gene.

[0037] In some aspects, the region the sense or antisense strand is complementary to is at least 15 contiguous nucleotides of an MSH3 gene corresponding to a sequence of reference mRNA NM 002439.4 at positions 879-921 of the MSH3 gene.

[0038] In some aspects, the region the sense or antisense strand is complementary to is at least 15 contiguous nucleotides of an MSH3 gene corresponding to a sequence of reference mRNA NM 002439.4 at one or more of positions 875-989, 1019-1088, 1370-1393, 1466-1569, 1721-1849, 1879-1970, 2783-2806, 2847-2922, 3043-3119, 3241-3314, 3330-3353, or 3703-3792 of the MSH3 gene.

[0039] In some aspects, the region the sense or antisense strand is complementary to is at least 15 contiguous nucleotides of an MSH3 gene corresponding to a sequence of reference mRNA NM 002439.4 at one or more of positions 566-589, 678-701, 875-989, 1019-1088, 1370-1393, 1466-1569, 1721-1849, 1879-2038, 2086-2171, 2783-2806, 2847-2922, 3043-3119, 3241-3314, 3330-3353, or 3701-3792 of the MSH3 gene.

[0040] In some aspects, the antisense strand comprises an antisense nucleobase sequence selected from Table 3, wherein the 5′ nucleotide represented by U can be any nucleotide (e.g., U, A, C, G), and the sense strand comprises a sense nucleobase sequence complementary to the antisense nucleobase sequence. In some aspects, the antisense nucleobase sequence consists of an antisense strand in Table 3, wherein the 5′ nucleotide represented by U can be any nucleotide (e.g., U, A, C, G), and the sense nucleobase sequence consists of a sequence complementary to the antisense nucleobase sequence. In some aspects, the sense strand comprises a sense nucleobase sequence selected from Table 3, and the antisense strand comprises an antisense nucleobase sequence complementary to the sense nucleobase sequence. In some aspects, the sense nucleobase sequence consists of a sense strand in Table 3, and the antisense nucleobase sequence consists of a sequence complementary to the sense nucleobase sequence.

[0041] In some aspects, the sense strand comprises a sense nucleobase sequence selected from Tables 4-10, and the antisense strand comprises an antisense nucleobase sequence complementary to the sense nucleobase sequence. In some aspects, the sense nucleobase sequence consists of a sense strand in any one of Tables 4-10, and the antisense nucleobase sequence consists of a sequence complementary to the sense nucleobase sequence.

[0042] In some aspects, the antisense strand comprises an antisense nucleobase sequence selected from Table 11, wherein the 5′ nucleotide represented by U can be any nucleotide (e.g., U, A, C, G), and the sense strand comprises a sense nucleobase sequence complementary to the antisense nucleobase sequence. In some aspects, the antisense nucleobase sequence consists of an antisense strand in Table 11, wherein the 5′ nucleotide represented by U can be any nucleotide (e.g., U, A, C, G), and the sense nucleobase sequence consists of a sequence complementary to the antisense nucleobase sequence In some aspects, the sense strand comprises a sense nucleobase sequence selected from Table 11, and the antisense strand comprises an antisense nucleobase sequence complementary to the sense nucleobase sequence. In some aspects, the sense nucleobase sequence consists of a sense strand in Table 11, and the antisense nucleobase sequence consists of a sequence complementary to the sense nucleobase sequence.

[0043] In some aspects, the dsRNA comprises at least one alternative nucleobase, at least one alternative internucleoside linkage, and/or at least one alternative sugar moiety. In some aspects, at least one alternative internucleoside linkage is a phosphorothioate internucleoside linkage. In some aspects, at least one alternative internucleoside linkage is a 2′-alkoxy internucleoside linkage. In some aspects, at least one alternative internucleoside linkage is an alkyl phosphate internucleoside linkage. In some aspects, at least one alternative nucleobase is 5′-methylcytosine, pseudouridine, or 5-methoxyuridine. In some aspects, at least one alternative sugar moiety is 2′-OMe or a bicyclic nucleic acid. In some aspects, the dsRNA comprises at least one 2′-OMe sugar moiety and at least one phosphorothioate internucleoside linkage.

[0044] In some aspects, the dsRNA further comprises a ligand conjugated to the 3′ end of the sense strand through a monovalent or branched bivalent or trivalent linker.

[0045] In some aspects, the sense strand comprises a nucleobase sequence of any one of SEQ ID NOs: 140, 156, 234, 240, 246, 380, 382, 386, 388, 396, 406, 418, 464, 478, 520, 540, 564, 568, 750, 822, 830, 844, 868, 870, 874, 904, 1042, 1060, 1062, 1064, 1068, 1090, 1096, 1098, 1114, 1116, 1166, 1168, 1170, 1182, 1192, 1212, 1214, 1216, 1222, 1244, 1258, 1292, 1358, 1360, 1374, 1378, 1380, 1400, 1866, 1868, 1870, 1882, 1892, 1926, 1946, 1964, 1970, 2084, 2088, 2090, 2094, 2124, 2130, 2146, 2264, 2290, 2308, 2318, 2324, 2606, 2608, 2610, 2632, 2652, 2678, or 2690.

[0046] In some aspects, the sense strand comprises a nucleobase sequence of any one of SEQ ID NOs: 380, 382, 386, 388, 396, 406, 418, 464, 478, 520, 540, 564, 568, 750, 1166, 1168, 1170, 1182, 1192, 1212, 1214, 1216, 1222, 2264, 2290, 2308, or 2318.

[0047] In some aspects, the sense strand comprises a nucleobase sequence of any one of SEQ ID NOs: 380, 382, 386, 388, 396, 406, 418, 464, 478, 520, 540, 564, 568, 750, 822, 830, 844, 868, 870, 874, 904, 1060, 1062, 1064, 1068, 1090, 1096, 1098, 1114, 1116, 1166, 1168, 1170, 1182, 1192, 1212, 1214, 1216, 1222, 1244, 1258, 1292, 1358, 1360, 1374, 1378, 1380, 1400, 1866, 1868, 1870, 1882, 1892, 1926, 1946, 1964, 1970, 2084, 2088, 2090, 2094, 2124, 2130, 2146, 2264, 2290, 2308, 2318, 2324, 2606, 2608, 2610, 2632, 2652, 2678, or 2690.

[0048] In some aspects, the sense strand comprises a nucleobase sequence of any one of SEQ ID NOs: 234, 240, 246, 380, 382, 386, 388, 396, 406, 418, 464, 478, 520, 540, 564, 568, 750, 822, 830, 844, 868, 870, 874, 904, 1042, 1060, 1062, 1064, 1068, 1090, 1096, 1098, 1114, 1116, 1166, 1168, 1170, 1182, 1192, 1212, 1214, 1216, 1222, 1244, 1258, 1292, 1358, 1360, 1374, 1378, 1380, 1400, 1866, 1868, 1870, 1882, 1892, 1926, 1946, 1964, 1970, 2084, 2088, 2090, 2094, 2124, 2130, 2146, 2264, 2290, 2308, 2318, 2324, 2606, 2608, 2610, 2632, 2652, 2678, or 2690.

[0049] In some aspects, the sense strand comprises a nucleobase sequence of any one of SEQ ID NOs: 380, 382, 386, 388, 396, 406, 418, 464, 478, 520, 540, 564, 568, 750, 822, 830, 844, 868, 870, 874, 904, 1042, 1060, 1062, 1064, 1068, 1090, 1096, 1098, 1114, 1116, 1166, 1168, 1170, 1182, 1192, 1212, 1214, 1216, 1222, 1244, 1866, 1868, 1870, 1882, 1892, 1926, 1946, 1964, 1970, 2084, 2088, 2090, 2094, 2124, 2130, 2146, 2264, 2290, 2308, 2318, 2324, 2606, 2608, 2610, 2632, 2652, 2678, or 2690.

[0050] In some aspects, the sense strand comprises a nucleobase sequence of any one of SEQ ID NOs: 140, 156, 234, 240, 246, 380, 382, 386, 388, 396, 406, 418, 464, 478, 520, 540, 564, 568, 750, 822, 830, 844, 868, 870, 874, 904, 1042, 1060, 1062, 1064, 1068, 1090, 1096, 1098, 1114, 1116, 1166, 1168, 1170, 1182, 1192, 1212, 1214, 1216, 1222, 1244, 1258, 1292, 1358, 1360, 1374, 1378, 1380, 1400, 1866, 1868, 1870, 1882, 1892, 1926, 1946, 1964, 1970, 2084, 2088, 2090, 2094, 2124, 2130, 2146, 2264, 2290, 2308, 2318, 2324, 2606, 2608, 2610, 2632, 2652, 2678, or 2690.

[0051] In some aspects, the antisense strand comprises a nucleobase sequence of any one of SEQ ID NOs: 141, 157, 235, 241, 247, 381, 383, 387, 389, 397, 407, 419, 465, 479, 521, 541, 565, 569, 751, 823, 831, 845, 869, 871, 875, 905, 1043, 1061, 1063, 1065, 1069, 1091, 1097, 1099, 1115, 1117, 1167, 1169, 1171, 1183, 1193, 1213, 1215, 1217, 1223, 1245, 1259, 1293, 1359, 1361, 1375, 1379, 1381, 1401, 1867, 1869, 1871, 1883, 1893, 1927, 1947, 1965, 1971, 2085, 2089, 2091, 2095, 2125, 2131, 2147, 2265, 2291, 2309, 2319, 2325, 2607, 2609, 2611, 2633, 2653, 2679, or 2691, wherein the 5′ nucleotide represented by U can be any nucleotide (e.g., U, A, C, G).

[0052] In some aspects, the antisense strand comprises a nucleobase sequence of any one of SEQ ID NOs: 381, 383, 387, 389, 397, 407, 419, 465, 479, 521, 541, 565, 569, 751, 1167, 1169, 1171, 1183, 1193, 1213, 1215, 1217, 1223, 2265, 2291, 2309, or 2319, wherein the 5′ nucleotide represented by U can be any nucleotide (e.g., U, A, C, G).

[0053] In some aspects, the antisense strand comprises a nucleobase sequence of any one of SEQ ID NOs: 381, 383, 387, 389, 397, 407, 419, 465, 479, 521, 541, 565, 569, 751, 823, 831, 845, 869, 871, 875, 905, 1061, 1063, 1065, 1069, 1091, 1097, 1099, 1115, 1117, 1167, 1169, 1171, 1183, 1193, 1213, 1215, 1217, 1223, 1245, 1259, 1293, 1359, 1361, 1375, 1379, 1381, 1401, 1867, 1869, 1871, 1883, 1893, 1927, 1947, 1965, 1971, 2085, 2089, 2091, 2095, 2125, 2131, 2147, 2265, 2291, 2309, 2319, 2325, 2607, 2609, 2611, 2633, 2653, 2679, or 2691, wherein the 5′ nucleotide represented by U can be any nucleotide (e.g., U, A, C, G).

[0054] In some aspects, the antisense strand comprises a nucleobase sequence of any one of SEQ ID NOs: 235, 241, 247, 381, 383, 387, 389, 397, 407, 419, 465, 479, 521, 541, 565, 569, 751, 823, 831, 845, 869, 871, 875, 905, 1043, 1061, 1063, 1065, 1069, 1091, 1097, 1099, 1115, 1117, 1167, 1169, 1171, 1183, 1193, 1213, 1215, 1217, 1223, 1245, 1259, 1293, 1359, 1361, 1375, 1379, 1381, 1401, 1867, 1869, 1871, 1883, 1893, 1927, 1947, 1965, 1971, 2085, 2089, 2091, 2095, 2125, 2131, 2147, 2265, 2291, 2309, 2319, 2325, 2607, 2609, 2611, 2633, 2653, 2679, or 2691, wherein the 5′ nucleotide represented by U can be any nucleotide (e.g., U, A, C, G).

[0055] In some aspects, the antisense strand comprises a nucleobase sequence of any one of SEQ ID NOs: 381, 383, 387, 389, 397, 407, 419, 465, 479, 521, 541, 565, 569, 751, 823, 831, 845, 869, 871, 875, 905, 1043, 1061, 1063, 1065, 1069, 1091, 1097, 1099, 1115, 1117, 1167, 1169, 1171, 1183, 1193, 1213, 1215, 1217, 1223, 1245, 1867, 1869, 1871, 1883, 1893, 1927, 1947, 1965, 1971, 2085, 2089, 2091, 2095, 2125, 2131, 2147, 2265, 2291, 2309, 2319, 2325, 2607, 2609, 2611, 2633, 2653, 2679, or 2691, wherein the 5′ nucleotide represented by U can be any nucleotide (e.g., U, A, C, G).

[0056] In some aspects, the antisense strand comprises a nucleobase sequence of any one of SEQ ID NOs: 141, 157, 235, 241, 247, 381, 383, 387, 389, 397, 407, 419, 465, 479, 521, 541, 565, 569, 751, 823, 831, 845, 869, 871, 875, 905, 1043, 1061, 1063, 1065, 1069, 1091, 1097, 1099, 1115, 1117, 1167, 1169, 1171, 1183, 1193, 1213, 1215, 1217, 1223, 1245, 1259, 1293, 1359, 1361, 1375, 1379, 1381, 1401, 1867, 1869, 1871, 1883, 1893, 1927, 1947, 1965, 1971, 2085, 2089, 2091, 2095, 2125, 2131, 2147, 2265, 2291, 2309, 2319, 2325, 2607, 2609, 2611, 2633, 2653, 2679, or 2691, wherein the 5′ nucleotide represented by U can be any nucleotide (e.g., U, A, C, G).

[0057] In some aspects, the sense strand consists of a nucleobase sequence of any one of SEQ ID NOs: 140, 156, 234, 240, 246, 380, 382, 386, 388, 396, 406, 418, 464, 478, 520, 540, 564, 568, 750, 822, 830, 844, 868, 870, 874, 904, 1042, 1060, 1062, 1064, 1068, 1090, 1096, 1098, 1114, 1116, 1166, 1168, 1170, 1182, 1192, 1212, 1214, 1216, 1222, 1244, 1258, 1292, 1358, 1360, 1374, 1378, 1380, 1400, 1866, 1868, 1870, 1882, 1892, 1926, 1946, 1964, 1970, 2084, 2088, 2090, 2094, 2124, 2130, 2146, 2264, 2290, 2308, 2318, 2324, 2606, 2608, 2610, 2632, 2652, 2678, or 2690.

[0058] In some aspects, the sense strand consists of a nucleobase sequence of any one of SEQ ID NOs: 380, 382, 386, 388, 396, 406, 418, 464, 478, 520, 540, 564, 568, 750, 1166, 1168, 1170, 1182, 1192, 1212, 1214, 1216, 1222, 2264, 2290, 2308, or 2318.

[0059] In some aspects, the sense strand consists of a nucleobase sequence of any one of SEQ ID NOs: 380, 382, 386, 388, 396, 406, 418, 464, 478, 520, 540, 564, 568, 750, 822, 830, 844, 868, 870, 874, 904, 1060, 1062, 1064, 1068, 1090, 1096, 1098, 1114, 1116, 1166, 1168, 1170, 1182, 1192, 1212, 1214, 1216, 1222, 1244, 1258, 1292, 1358, 1360, 1374, 1378, 1380, 1400, 1866, 1868, 1870, 1882, 1892, 1926, 1946, 1964, 1970, 2084, 2088, 2090, 2094, 2124, 2130, 2146, 2264, 2290, 2308, 2318, 2324, 2606, 2608, 2610, 2632, 2652, 2678, or 2690.

[0060] In some aspects, the sense strand consists of a nucleobase sequence of any one of SEQ ID NOs: 234, 240, 246, 380, 382, 386, 388, 396, 406, 418, 464, 478, 520, 540, 564, 568, 750, 822, 830, 844, 868, 870, 874, 904, 1042, 1060, 1062, 1064, 1068, 1090, 1096, 1098, 1114, 1116, 1166, 1168, 1170, 1182, 1192, 1212, 1214, 1216, 1222, 1244, 1258, 1292, 1358, 1360, 1374, 1378, 1380, 1400, 1866, 1868, 1870, 1882, 1892, 1926, 1946, 1964, 1970, 2084, 2088, 2090, 2094, 2124, 2130, 2146, 2264, 2290, 2308, 2318, 2324, 2606, 2608, 2610, 2632, 2652, 2678, or 2690.

[0061] In some aspects, the sense strand consists of a nucleobase sequence of any one of SEQ ID NOs: 380, 382, 386, 388, 396, 406, 418, 464, 478, 520, 540, 564, 568, 750, 822, 830, 844, 868, 870, 874, 904, 1042, 1060, 1062, 1064, 1068, 1090, 1096, 1098, 1114, 1116, 1166, 1168, 1170, 1182, 1192, 1212, 1214, 1216, 1222, 1244, 1866, 1868, 1870, 1882, 1892, 1926, 1946, 1964, 1970, 2084, 2088, 2090, 2094, 2124, 2130, 2146, 2264, 2290, 2308, 2318, 2324, 2606, 2608, 2610, 2632, 2652, 2678, or 2690.

[0062] In some aspects, the sense strand consists of a nucleobase sequence of any one of SEQ ID NOs: 140, 156, 234, 240, 246, 380, 382, 386, 388, 396, 406, 418, 464, 478, 520, 540, 564, 568, 750, 822, 830, 844, 868, 870, 874, 904, 1042, 1060, 1062, 1064, 1068, 1090, 1096, 1098, 1114, 1116, 1166, 1168, 1170, 1182, 1192, 1212, 1214, 1216, 1222, 1244, 1258, 1292, 1358, 1360, 1374, 1378, 1380, 1400, 1866, 1868, 1870, 1882, 1892, 1926, 1946, 1964, 1970, 2084, 2088, 2090, 2094, 2124, 2130, 2146, 2264, 2290, 2308, 2318, 2324, 2606, 2608, 2610, 2632, 2652, 2678, or 2690.

[0063] In some aspects, the sense strand consists of a nucleobase sequence of any one of SEQ ID NOs: 141, 157, 235, 241, 247, 381, 383, 387, 389, 397, 407, 419, 465, 479, 521, 541, 565, 569, 751, 823, 831, 845, 869, 871, 875, 905, 1043, 1061, 1063, 1065, 1069, 1091, 1097, 1099, 1115, 1117, 1167, 1169, 1171, 1183, 1193, 1213, 1215, 1217, 1223, 1245, 1259, 1293, 1359, 1361, 1375, 1379, 1381, 1401, 1867, 1869, 1871, 1883, 1893, 1927, 1947, 1965, 1971, 2085, 2089, 2091, 2095, 2125, 2131, 2147, 2265, 2291, 2309, 2319, 2325, 2607, 2609, 2611, 2633, 2653, 2679, or 2691.

[0064] In some aspects, the antisense strand consists of a nucleobase sequence of any one of SEQ ID NOs: 381, 383, 387, 389, 397, 407, 419, 465, 479, 521, 541, 565, 569, 751, 1167, 1169, 1171, 1183, 1193, 1213, 1215, 1217, 1223, 2265, 2291, 2309, or 2319, wherein the 5′ nucleotide represented by U can be any nucleotide (e.g., U, A, C, G).

[0065] In some aspects, the antisense strand consists of a nucleobase sequence of any one of SEQ ID NOs: 381, 383, 387, 389, 397, 407, 419, 465, 479, 521, 541, 565, 569, 751, 823, 831, 845, 869, 871, 875, 905, 1061, 1063, 1065, 1069, 1091, 1097, 1099, 1115, 1117, 1167, 1169, 1171, 1183, 1193, 1213, 1215, 1217, 1223, 1245, 1259, 1293, 1359, 1361, 1375, 1379, 1381, 1401, 1867, 1869, 1871, 1883, 1893, 1927, 1947, 1965, 1971, 2085, 2089, 2091, 2095, 2125, 2131, 2147, 2265, 2291, 2309, 2319, 2325, 2607, 2609, 2611, 2633, 2653, 2679, or 2691, wherein the 5′ nucleotide represented by U can be any nucleotide (e.g., U, A, C, G).

[0066] In some aspects, the antisense strand consists of a nucleobase sequence of any one of SEQ ID NOs: 235, 241, 247, 381, 383, 387, 389, 397, 407, 419, 465, 479, 521, 541, 565, 569, 751, 823, 831, 845, 869, 871, 875, 905, 1043, 1061, 1063, 1065, 1069, 1091, 1097, 1099, 1115, 1117, 1167, 1169, 1171, 1183, 1193, 1213, 1215, 1217, 1223, 1245, 1259, 1293, 1359, 1361, 1375, 1379, 1381, 1401, 1867, 1869, 1871, 1883, 1893, 1927, 1947, 1965, 1971, 2085, 2089, 2091, 2095, 2125, 2131, 2147, 2265, 2291, 2309, 2319, 2325, 2607, 2609, 2611, 2633, 2653, 2679, or 2691, wherein the 5′ nucleotide represented by U can be any nucleotide (e.g., U, A, C, G).

[0067] In some aspects, the antisense strand consists of a nucleobase sequence of any one of SEQ ID NOs: 381, 383, 387, 389, 397, 407, 419, 465, 479, 521, 541, 565, 569, 751, 823, 831, 845, 869, 871, 875, 905, 1043, 1061, 1063, 1065, 1069, 1091, 1097, 1099, 1115, 1117, 1167, 1169, 1171, 1183, 1193, 1213, 1215, 1217, 1223, 1245, 1867, 1869, 1871, 1883, 1893, 1927, 1947, 1965, 1971, 2085, 2089, 2091, 2095, 2125, 2131, 2147, 2265, 2291, 2309, 2319, 2325, 2607, 2609, 2611, 2633, 2653, 2679, or 2691, wherein the 5′ nucleotide represented by U can be any nucleotide (e.g., U, A, C, G).

[0068] In some aspects, the antisense strand consists of a nucleobase sequence of any one of SEQ ID NOs: 141, 157, 235, 241, 247, 381, 383, 387, 389, 397, 407, 419, 465, 479, 521, 541, 565, 569, 751, 823, 831, 845, 869, 871, 875, 905, 1043, 1061, 1063, 1065, 1069, 1091, 1097, 1099, 1115, 1117, 1167, 1169, 1171, 1183, 1193, 1213, 1215, 1217, 1223, 1245, 1259, 1293, 1359, 1361, 1375, 1379, 1381, 1401, 1867, 1869, 1871, 1883, 1893, 1927, 1947, 1965, 1971, 2085, 2089, 2091, 2095, 2125, 2131, 2147, 2265, 2291, 2309, 2319, 2325, 2607, 2609, 2611, 2633, 2653, 2679, or 2691, wherein the 5′ nucleotide represented by U can be any nucleotide (e.g., U, A, C, G).

[0069] In some aspects, the dsRNA exhibits at least 50% mRNA inhibition at a 0.5 nM dsRNA concentration when determined using a cell assay when compared with a control cell. In some aspects, the dsRNA exhibits at least 40% mRNA inhibition at a 0.5 nM dsRNA concentration when determined using a cell assay when compared with a control cell. In some aspects, the dsRNA exhibits at least 30% mRNA inhibition at a 0.5 nM dsRNA concentration when determined using a cell assay when compared with a control cell. In some aspects, the dsRNA exhibits at least 70% mRNA inhibition at a 10 nM dsRNA concentration when determined using a cell assay when compared with a control cell. In some aspects, the dsRNA exhibits at least 60% mRNA inhibition at a 10 nM dsRNA concentration when determined using a cell assay when compared with a control cell. In some aspects, the dsRNA exhibits at least 50% mRNA inhibition at a 10 nM dsRNA concentration when determined using a cell assay when compared with a control cell.

[0070] In some aspects, the antisense strand is complementary to at least 17 contiguous nucleotides of an MSH3 gene. In some aspects, the antisense strand is complementary to at least 19 contiguous nucleotides of an MSH3 gene. In some aspects, the antisense strand is complementary to 19 contiguous nucleotides of an MSH3 gene. In some aspects, the sense strand is complementary to at least 17 contiguous nucleotides of an MSH3 gene. In some aspects, the sense strand is complementary to at least 19 contiguous nucleotides of an MSH3 gene. In some aspects, the sense strand is complementary to 19 contiguous nucleotides of an MSH3 gene.

[0071] In some aspects, the antisense strand and/or the sense strand comprises a 3′ overhang of at least 1 linked nucleoside; or a 3′ overhang of at least 2 linked nucleosides.

[0072] In some aspects, this disclosure is directed to a pharmaceutical composition comprising one or more of the dsRNAs described herein and a pharmaceutically acceptable carrier.

[0073] In some aspects, this disclosure is directed to a composition comprising one or more of the dsRNAs described herein and a lipid nanoparticle, a polyplex nanoparticle, a lipoplex nanoparticle, or a liposome.

[0074] In some aspects, this disclosure is directed to a vector encoding at least one strand of any one of the dsRNAs described herein.

[0075] In some aspects, this disclosure is directed to a cell comprising the vector encoding at least one strand of any one of the dsRNAs described herein.

[0076] In some aspects, this disclosure is directed to a method of reducing transcription of MSH3 in a cell, the method comprising contacting the cell with one or more of the dsRNAs described herein, a pharmaceutical composition of one or more the dsRNAs described herein, a composition of one or more of the dsRNAs described herein and a lipid nanoparticle, a polyplex nanoparticle, a lipoplex nanoparticle, or a liposome, the vector encoding at least one strand of any one of the dsRNAs described herein, or the cell comprising the vector encoding at least one strand of any one of the dsRNAs described herein, for a time sufficient to obtain degradation of an mRNA transcript of MSH3, thereby reducing expression of MSH3 in the cell.

[0077] In some aspects, this disclosure is directed to a method of treating, preventing, or delaying progression of a trinucleotide repeat expansion disorder in a subject in need thereof, the method comprising contacting the cell with one or more of the dsRNAs described herein, a pharmaceutical composition of one or more the dsRNAs described herein, a composition of one or more of the dsRNAs described herein and a lipid nanoparticle, a polyplex nanoparticle, a lipoplex nanoparticle, or a liposome, the vector encoding at least one strand of any one of the dsRNAs described herein, or the cell comprising the vector encoding at least one strand of any one of the dsRNAs described herein.

[0078] In some aspects, this disclosure is directed to a method of reducing the level and/or activity of MSH3 in a cell of a subject identified as having a trinucleotide repeat expansion disorder, the method comprising contacting the cell with one or more of the dsRNAs described herein, a pharmaceutical composition of one or more the dsRNAs described herein, a composition of one or more of the dsRNAs described herein and a lipid nanoparticle, a polyplex nanoparticle, a lipoplex nanoparticle, or a liposome, the vector encoding at least one strand of any one of the dsRNAs described herein, or the cell comprising the vector encoding at least one strand of any one of the dsRNAs described herein.

[0079] In some aspects, this disclosure is directed to a method for reducing expression of MSH3 in a cell the method comprising contacting the cell with one or more of the dsRNAs described herein, a pharmaceutical composition of one or more the dsRNAs described herein, a composition of one or more of the dsRNAs described herein and a lipid nanoparticle, a polyplex nanoparticle, a lipoplex nanoparticle, or a liposome, the vector encoding at least one strand of any one of the dsRNAs described herein, or the cell comprising the vector encoding at least one strand of any one of the dsRNAs described herein, thereby reducing expression of MSH3 in the cell.

[0080] In some aspects, this disclosure is directed to a method of decreasing nucleotide repeat expansion (e.g., trinucleotide repeat expansion) in a cell, the method comprising contacting the cell with one or more of the dsRNAs described herein, a pharmaceutical composition of one or more the dsRNAs described herein, a composition of one or more of the dsRNAs described herein and a lipid nanoparticle, a polyplex nanoparticle, a lipoplex nanoparticle, or a liposome, the vector encoding at least one strand of any one of the dsRNAs described herein, or the cell comprising the vector encoding at least one strand of any one of the dsRNAs described herein.

[0081] In some aspects, the cell is in a subject. In some aspects, the subject is a human. In some aspects, the cell is a cell of the central nervous system or a muscle cell.

[0082] In some aspects, the subject is identified as having a nucleotide repeat expansion disorder (e.g., a trinucleotide repeat expansion). In some aspects, the nucleotide repeat expansion disorder (e.g., a trinucleotide repeat expansion) is a polyglutamine disease. In some aspects, the polyglutamine disease is selected from the group consisting of dentatorubropallidoluysian atrophy, Huntington's disease, spinal and bulbar muscular atrophy, spinocerebellar ataxia type 1, spinocerebellar ataxia type 2, spinocerebellar ataxia type 3, spinocerebellar ataxia type 6, spinocerebellar ataxia type 7, spinocerebellar ataxia type 17, and Huntington's disease-like 2. In some aspects, the nucleotide repeat expansion disorder (e.g., a trinucleotide repeat expansion disorder) is Huntington's disease.

[0083] In some aspects, the inucleotide repeat expansion disorder (e.g., a trinucleotide repeat expansion disorder) is a non-polyglutamine disease. In some aspects, the non-polyglutamine disease is selected from the group consisting of fragile X syndrome, fragile X-associated tremor/ataxia syndrome, fragile XE mental retardation, Friedreich's ataxia, myotonic dystrophy type 1, spinocerebellar ataxia type 8, spinocerebellar ataxia type 12, oculopharyngeal muscular dystrophy, Fragile X-associated premature ovarian failure, FRA2A syndrome, FRA7A syndrome, and early infantile epileptic encephalopathy. In some aspects, the nucleotide repeat expansion disorder (e.g., a trinucleotide repeat expansion disorder) is Friedreich's ataxia. In some aspects, the nucleotide repeat expansion disorder (e.g., trinucleotide repeat expansion disorder) is myotonic dystrophy type 1.

[0084] In some aspects, this disclosure is directed to one or more of the dsRNAs described herein, a pharmaceutical composition of one or more the dsRNAs described herein, a composition of one or more of the dsRNAs described herein and a lipid nanoparticle, a polyplex nanoparticle, a lipoplex nanoparticle, or a liposome, the vector encoding at least one strand of any one of the dsRNAs described herein, or the cell comprising the vector encoding at least one strand of any one of the dsRNAs described herein for use in prevention or treatment of a nucleotide repeat expansion disorder (e.g., a trinucleotide repeat expansion disorder).

[0085] In some aspects, the one or more of the dsRNAs described herein, the pharmaceutical composition of one or more the dsRNAs described herein, the composition of one or more of the dsRNAs described herein and a lipid nanoparticle, a polyplex nanoparticle, a lipoplex nanoparticle, or a liposome, the vector encoding at least one strand of any one of the dsRNAs described herein, or the cell comprising the vector encoding at least one strand of any one of the dsRNAs described herein is administered intrathecally.

[0086] In some aspects, the one or more of the dsRNAs described herein, the pharmaceutical composition of one or more the dsRNAs described herein, the composition of one or more of the dsRNAs described herein and a lipid nanoparticle, a polyplex nanoparticle, a lipoplex nanoparticle, or a liposome, the vector encoding at least one strand of any one of the dsRNAs described herein, or the cell comprising the vector encoding at least one strand of any one of the dsRNAs described herein is administered intraventricularly.

[0087] In some aspects, the one or more of the dsRNAs described herein, the pharmaceutical composition of one or more the dsRNAs described herein, the composition of one or more of the dsRNAs described herein and a lipid nanoparticle, a polyplex nanoparticle, a lipoplex nanoparticle, or a liposome, the vector encoding at least one strand of any one of the dsRNAs described herein, or the cell comprising the vector encoding at least one strand of any one of the dsRNAs described herein is administered intramuscularly.

[0088] In some aspects, this disclosure is directed to a method of treating, preventing, or delaying progression of a disorder in a subject in need thereof wherein the subject is suffering from a nucleotide repeat expansion disorder (e.g., a trinucleotide repeat expansion disorder), comprising administering to said subject one or more of the dsRNAs described herein, the pharmaceutical composition of one or more the dsRNAs described herein, the composition of one or more of the dsRNAs described herein and a lipid nanoparticle, a polyplex nanoparticle, a lipoplex nanoparticle, or a liposome, the vector encoding at least one strand of any one of the dsRNAs described herein, or the cell comprising the vector encoding at least one strand of any one of the dsRNAs described herein.

[0089] In some aspects, the method of treating, preventing, or delaying progression of a disorder in a subject further comprises administering at least one additional therapeutic agent. In some aspects, the at least one additional therapeutic agent is another oligonucleotide, or pharmaceutically acceptable salt thereof, that hybridizes to an mRNA encoding the Huntingtin gene.

[0090] In some aspects, the method of treating, preventing, or delaying progression of a disorder in a subject delays progression of the nucleotide repeat expansion disorder (e.g., a trinucleotide repeat expansion disorder) by at least 120 days, for example, at least 6 months, at least 12 months, at least 2 years, at least 3 years, at least 4 years, at least 5 years, at least 10 years or more, when compared with a predicted progression.

### Definitions

[0091] For convenience, the meaning of some terms and phrases used in the specification, examples, and appended claims are provided below. Unless stated otherwise, or implicit from context, the following terms and phrases include the meanings provided below. The definitions are provided to aid in describing particular aspects, and are not intended to limit the claimed technology, because the scope of the technology is limited only by the claims. Unless otherwise defined, all technical and scientific terms used herein have the same meaning as commonly understood by one of ordinary skill in the art to which this technology belongs. If there is an apparent discrepancy between the usage of a term in the art and its definition provided herein, the definition provided within the specification shall prevail.

[0092] In this application, unless otherwise clear from context, (i) the term “a” can be understood to mean “at least one”; (ii) the term “or” can be understood to mean “and/or”; and (iii) the terms “including” and “comprising” can be understood to encompass itemized components or steps whether presented by themselves or together with one or more additional components or steps.

[0093] As used herein, the terms “about” and “approximately” refer to a value that is within 10% above or below the value being described. For example, the term “about 5 nM” indicates a range of from 4.5 to 5.5 nM.

[0094] The term “at least” prior to a number or series of numbers is understood to include the number adjacent to the term “at least”, and all subsequent numbers or integers that could logically be included, as clear from context. For example, the number of nucleotides in a nucleic acid molecule must be an integer. For example, “at least 18 nucleotides of a 21-nucleotide nucleic acid molecule” means that 18, 19, 20, or 21 nucleotides have the indicated property. When at least is present before a series of numbers or a range, it is understood that “at least” can modify each of the numbers in the series or range. “At least” is also not limited to integers (e.g., “at least 5%” includes 5.0%, 5.1%, and 5.18% without consideration of the number of significant figures.

[0095] As used herein, “no more than” or “less than” is understood as the value adjacent to the phrase and logical lower values or integers, as logical from context, to zero. For example, a duplex with an overhang of “no more than two linked nucleosides” has a 2, 1, or 0 linked nucleoside overhang. When “no more than” is present before a series of numbers or a range, it is understood that “no more than” can modify each of the numbers in the series or range.

[0096] As used herein, the term “administration” refers to the administration of a composition (e.g., a compound or a preparation that includes a compound as described herein) to a subject or system. Administration to an animal subject (e.g., to a human) can be by any appropriate route, such as one described herein.

[0097] As used herein, a “combination therapy” or “administered in combination” means that two (or more) different agents or treatments are administered to a subject as part of a defined treatment regimen for a particular disease or condition. The treatment regimen defines the doses and periodicity of administration of each agent such that the effects of the separate agents on the subject overlap. In some aspects, the delivery of the two or more agents is simultaneous or concurrent and the agents can be co-formulated. In some aspects, the two or more agents are not co-formulated and are administered in a sequential manner as part of a prescribed regimen. In some aspects, administration of two or more agents or treatments in combination is such that the reduction in a symptom, or other parameter related to the disorder is greater than what would be observed with one agent or treatment delivered alone or in the absence of the other. The effect of the two treatments can be partially additive, wholly additive, or greater than additive (e.g., synergistic). Sequential or substantially simultaneous administration of each therapeutic agent can be effected by any appropriate route including, but not limited to, oral routes, intraocular routes, subcutaneous routes, intra cisterna magna routes, intravenous routes, intramuscular routes, intracerebroventricular routes, intrathecal routes, and direct absorption through mucous membrane tissues. The therapeutic agents can be administered by the same route or by different routes. For example, one therapeutic agent of the combination can be administered by intravenous injection while an additional therapeutic agent of the combination can be administered orally.

[0098] As used herein, the term “MSH3” refers to MutS Homolog 3, a DNA mismatch repair protein, having an amino acid sequence from any vertebrate or mammalian source, including, but not limited to, human, bovine, chicken, rodent, mouse, rat, porcine, ovine, primate, monkey, and guinea pig, unless specified otherwise. The term also refers to fragments and variants of native MSH3 that maintain at least one in vivo or in vitro activity of a native MSH3. The term encompasses full-length unprocessed precursor forms of MSH3 as well as mature forms resulting from post-translational cleavage of the signal peptide. MSH3 is encoded by the MSH3 gene. The nucleic acid sequence of an exemplary Homo sapiens (human) MSH3 gene is set forth in NCBI Reference NM_002439.4 or in SEQ ID NO: 1. The term “MSH3” also refers to natural variants of the wild-type MSH3 protein, such as proteins having at least 85% identity (e.g., 85%, 86%, 87%, 88%, 89%, 90%, 91%, 92%, 93%, 94%, 95%, 96%, 97%, 98%, 99%, 99.9% identity, or more) to the amino acid sequence of wild-type human MSH3, which is set forth in NCBI Reference No. NP_002430.3 or in SEQ ID NO: 2. The nucleic acid sequence of an exemplary Mus musculus (mouse) MSH3 gene is set forth in NCBI Reference No. NM_010829.2 or in SEQ ID NO: 3. The nucleic acid sequence of an exemplary Rattus norvegicus (rat) MSH3 gene is set forth in NCBI Reference No. NM_001191957.1 or in SEQ ID NO: 4. The nucleic acid sequence of an exemplary Macaca fascicularis (cyno) MSH3 gene is set forth in NCBI Reference No. XM_005557283.2 or in SEQ ID NO: 5.

[0099] The term “MSH3” as used herein also refers to a particular polypeptide expressed in a cell by naturally occurring DNA sequence variations of the MSH3 gene, such as a single nucleotide polymorphism in the MSH3 gene. Numerous SNPs within the MSH3 gene have been identified and can be found at, for example, NCBI dbSNP (see, e.g., www.ncbi.nlm.nih.gov/snp). Non-limiting examples of SNPs within the MSH3 gene can be found at, NCBI dbSNP Accession Nos.: rs1650697, rs70991108, rs10168, rs26279, rs26282, rs26779, rs26784, rs32989, rs33003, rs33008, rs33013, rs40139, rs181747, rs184967, rs245346, rs245397, rs249633, rs380691, rs408626, rs442767, rs836802, rs836808, rs863221, rs1105525, rs1428030, rs1478834, rs1650694, rs1650737, rs1677626, rs1677658, rs1805355, rs2897298, rs3045983, rs3797897, rs4703819, rs6151627, rs6151640, rs6151662, rs6151670, rs6151735, rs6151838, rs7709909, rs7712332, rs10079641, rs12513549, and rs12522132.

[0100] As used herein, “target sequence” refers to a contiguous portion of the nucleotide sequence of an mRNA molecule formed during the transcription of an MSH3 gene, including mRNA that is a product of RNA processing of a primary transcription product. In one aspect, the target portion of the sequence will be at least long enough to serve as a substrate for dsRNA-directed cleavage at or near that portion of the nucleotide sequence of an mRNA molecule formed during the transcription of a MSH3 gene. The target sequence can be, for example, from about 9-36 nucleotides in length, e.g., about 15-30 nucleotides in length. For example, the target sequence can be 15, 16, 17, 18, 19, 20, 21, 22, 23, 24, 25, 26, 27, 28, 29, or 30 or from about 15-30 nucleotides, 15-29, 15-28, 15-27, 15-26, 15-25, 15-24, 15-23, 15-22, 15-21, 15-20, 15-19, 15-18, 15-17, 18-30, 18-29, 18-28, 18-27, 18-26, 18-25, 18-24, 18-23, 18-22, 18-21, 18-20, 19-30, 19-29, 19-28, 19-27, 19-26, 19-25, 19-24, 19-23, 19-22, 19-21, 19-20, 20-30, 20-29, 20-28, 20-27, 20-26, 20-25, 20-24, 20-23, 20-22, 20-21, 21-30, 21-29, 21-28, 21-27, 21-26, 21-25, 21-24, 21-23, or 21-22 nucleotides in length. Ranges and lengths intermediate to the above recited ranges and lengths are also contemplated.

[0101] “G,” “C,” “A,” “T,” and “U” each generally stand for a naturally-occurring nucleotide that contains guanine, cytosine, adenine, thymidine, and uracil as a base, respectively. However, it will be understood that the term “nucleotide” can refer to an alternative nucleotide, as further detailed below, or a surrogate replacement moiety. The skilled person is well aware that guanine, cytosine, adenine, and uracil can be replaced by other moieties without substantially altering the base pairing properties of an oligonucleotide comprising a nucleotide bearing such replacement moiety. For example, without limitation, a nucleotide comprising inosine as its base can base pair with nucleotides containing adenine, cytosine, or uracil. Hence, nucleotides containing uracil, guanine, or adenine can be replaced in the nucleotide sequences of dsRNA featured herein by a nucleotide containing, for example, inosine. In another example, adenine and cytosine anywhere in the oligonucleotide can be replaced with guanine and uracil, respectively to form G-U Wobble base pairing with the target mRNA. Sequences containing such replacement moieties are suitable for the compositions and methods featured herein.

[0102] The terms “nucleobase” and “base” include the purine (e.g. adenine and guanine) and pyrimidine (e.g. uracil, thymine, and cytosine) moiety present in nucleosides and nucleotides which form hydrogen bonds in nucleic acid hybridization. The term nucleobase also encompasses alternative nucleobases which can differ from naturally-occurring nucleobases, but are functional during nucleic acid hybridization. In this context “nucleobase” refers to both naturally occurring nucleobases such as adenine, guanine, cytosine, thymidine, uracil, xanthine, and hypoxanthine, as well as alternative nucleobases. Such variants are for example described in Hirao et al (2012) Accounts of Chemical Research vol 45 page 2055 and Bergstrom (2009) Current Protocols in Nucleic Acid Chemistry Suppl. 37 1.4.1.

[0103] The term “nucleoside” refers to a monomeric unit of an oligonucleotide or a polynucleotide having a nucleobase and a sugar moiety. A nucleoside can include those that are naturally-occurring as well as alternative nucleosides, such as those described herein. The nucleobase of a nucleoside can be a naturally-occurring nucleobase or an alternative nucleobase. Similarly, the sugar moiety of a nucleoside can be a naturally-occurring sugar or an alternative sugar.

[0104] The term “alternative nucleoside” refers to a nucleoside having an alternative sugar or an alternative nucleobase, such as those described herein.

[0105] In some aspects, the nucleobase moiety is modified by changing the purine or pyrimidine into a modified purine or pyrimidine, such as substituted purine or substituted pyrimidine, such as an “alternative nucleobase” selected from isocytosine, pseudoisocytosine, 5-methyl cytosine, 5-thiozolo-cytosine, 5-propynyl-cytosine, 5-propynyl-uridine, 5-bromouridine 5-thiazolo-uridine, 2-thio-uridine, pseudouridine, 1-methylpseudouridine, 5-methoxyuridine, 2′-thio-thymine, inosine, diaminopurine, 6-aminopurine, 2-aminopurine, 2,6-diaminopurine, and 2-chloro-6-aminopurine.

[0106] The nucleobase moieties can be indicated by the letter code for each corresponding nucleobase, e.g. A, T, G, C, or U, wherein each letter can include alternative nucleobases of equivalent function.

[0107] A “sugar” or “sugar moiety,” includes naturally occurring sugars having a furanose ring. A sugar also includes an “alternative sugar,” defined as a structure that is capable of replacing the furanose ring of a nucleoside. In some aspects, alternative sugars are non-furanose (or 4′-substituted furanose) rings or ring systems or open systems. Such structures include simple changes relative to the natural furanose ring, such as a six-membered ring, or can be more complicated as is the case with the non-ring system used in peptide nucleic acid. Alternative sugars can include sugar surrogates wherein the furanose ring has been replaced with another ring system such as, for example, a morpholino or hexitol ring system. Sugar moieties useful in the preparation of oligonucleotides having motifs include, without limitation, β-D-ribose, β-D-2′-deoxyribose, substituted sugars (such as 2′, 5′ and bis substituted sugars), 4′-S-sugars (such as 4′-S-ribose, 4′-S-2′-deoxyribose and 4′-S-2′-substituted ribose), bicyclic alternative sugars (such as the 2′-O—CH₂-4′ or 2′-O—(CH₂)₂-4′ bridged ribose derived bicyclic sugars) and sugar surrogates (such as when the ribose ring has been replaced with a morpholino or a hexitol ring system). The type of heterocyclic base and internucleoside linkage used at each position is variable and is not a factor in determining the motif. In most nucleosides having an alternative sugar moiety, the heterocyclic nucleobase is generally maintained to permit hybridization.

[0108] A “nucleotide,” as used herein, refers to a monomeric unit of an oligonucleotide or polynucleotide that comprises a nucleoside and an internucleosidic linkage. The internucleosidic linkage can include a phosphate linkage. Similarly, “linked nucleosides” can be linked by phosphate linkages. Many “alternative internucleosidic linkages” are known in the art, including, but not limited to, phosphate, phosphorothioate, and boronophosphate linkages. Alternative nucleosides include bicyclic nucleosides (BNAs) (e.g., locked nucleosides (LNAs (e.g., A-LNA, 5mC L-NA, G-LNA, T-LNA)) and constrained ethyl (cEt) nucleosides), peptide nucleosides (PNAs), phosphotriesters, phosphorothionates, phosphoramidates, and other variants of the phosphate backbone of native nucleoside, including those described herein.

[0109] An “alternative nucleotide,” as used herein, refers to a nucleotide having an alternative nucleoside or an alternative sugar, and an internucleoside linkage, which can include alternative nucleoside linkages.

[0110] The terms “oligonucleotide” and “polynucleotide,” as used herein, are defined as it is generally understood by the skilled person as a molecule comprising two or more covalently linked nucleosides. Such covalently bound nucleosides can be referred to as nucleic acid molecules or oligomers. Oligonucleotides are commonly made in the laboratory by solid-phase chemical synthesis followed by purification. When referring to a sequence of the oligonucleotide, reference is made to the sequence or order of nucleobase moieties, or modifications thereof, of the covalently linked nucleotides or nucleosides. The oligonucleotide can be man-made. For example, the oligonucleotide can be chemically synthesized and be purified or isolated. Oligonucleotide is also intended to include (i) compounds that have one or more furanose moieties that are replaced by furanose derivatives or by any structure, cyclic or acyclic, that can be used as a point of covalent attachment for the base moiety, (ii) compounds that have one or more phosphodiester linkages that are either modified, as in the case of phosphoramidate or phosphorothioate linkages, or completely replaced by a suitable linking moiety as in the case of formacetal or riboacetal linkages, and/or (iii) compounds that have one or more linked furanose-phosphodiester linkage moieties replaced by any structure, cyclic or acyclic, that can be used as a point of covalent attachment for the base moiety. The oligonucleotides can comprise one or more alternative nucleosides or nucleotides (e.g., including those described herein). It is also understood that oligonucleotide includes compositions lacking a sugar moiety or nucleobase but is still capable of forming a pairing with or hybridizing to a target sequence.

[0111] “Oligonucleotide” refers to a short polynucleotide (e.g., of 100 or fewer linked nucleosides).

[0112] As used herein, the term “strand” refers to an oligonucleotide comprising a chain of linked nucleosides. A “strand comprising a nucleobase sequence” refers to an oligonucleotide comprising a chain of linked nucleosides that is described by the sequence referred to using the standard nucleobase nomenclature.

[0113] The term “antisense,” as used herein, refers to a nucleic acid comprising an oligonucleotide or polynucleotide that is sufficiently complementary to all or a portion of a gene, primary transcript, or processed mRNA, so as to interfere with expression of the endogenous gene (e.g., MSH3). “Complementary” polynucleotides are those that are capable of base pairing according to the standard Watson-Crick complementarity rules. Specifically, purines will base pair with pyrimidines to form a combination of guanine paired with cytosine (G:C) and adenine paired with either thymine (A:T) in the case of DNA, or adenine paired with uracil (A:U) in the case of RNA. It is understood that two polynucleotides can hybridize to each other even if they are not completely complementary to each other, provided that each has at least one region that is substantially complementary to the other.

[0114] The terms “antisense strand” and “guide strand” refer to the strand of a dsRNA that includes a region that is substantially complementary to a target sequence, e.g., an MSH3 mRNA.

[0115] The terms “sense strand” and “passenger strand,” as used herein, refer to the strand of a dsRNA that includes a region that is substantially complementary to a region of the antisense strand as that term is defined herein.

[0116] The term “dsRNA” refers to an agent that includes a sense strand and antisense strand that contains linked nucleosides as that term is defined herein. dsRNA includes, for example, siRNAs and shRNAs, which mediate the targeted cleavage of an RNA transcript via an RNA-induced silencing complex (RISC) pathway. dsRNA directs the sequence-specific degradation of mRNA through a process known as RNA interference (RNAi). The dsRNA reduces the expression of MSH3 in a cell, e.g., a cell within a subject, such as a mammalian subject. In general, the majority of linked nucleosides of each strand of a dsRNA are ribonucleosides, but as described in detail herein, each or both strands can include one or more non-ribonucleosides, e.g., deoxyribonucleosides and/or alternative nucleosides.

[0117] The terms “siRNA” and “short interfering RNA” (also known as “small interfering RNA”) refer to an RNA agent, such as a double-stranded agent, of about 10-50 nucleotides in length, the strands optionally having overhanging ends comprising, for example 1, 2, or 3 overhanging linked nucleosides, which is capable of directing or mediating RNA interference. Naturally-occurring siRNAs are generated from longer dsRNA molecules (e.g., >25 linked nucleosides in length) by a cell's RNAi machinery (e.g., Dicer or a homolog thereof).

[0118] The terms “shRNA” and “short hairpin RNA,” as used herein, refer to an RNA agent having a stem-loop structure, comprising at least two regions of complementary sequence, the degree of complementarity and orientation of the regions being sufficient such that base pairing occurs between the regions, at least two of the regions being joined by a loop region which results from a lack of base pairing between nucleobases within the loop region.

[0119] “Chimeric” dsRNA or “chimera” is a dsRNA which contains two or more chemically distinct regions, each made up of at least one monomer unit, i.e., a nucleoside or nucleotide.

[0120] The duplex region can be of any length that permits specific degradation of a desired target RNA through a RISC pathway, and can range from about 9 to 36 base pairs in length, e.g., about 10-30 base pairs in length, e.g., about 15-30 base pairs in length or about 18-20 base pairs in length, for example, about 9, 10, 11, 12, 13, 14, 15, 16, 17, 18, 19, 20, 21, 22, 23, 24, 25, 26, 27, 28, 29, 30, 31, 32, 33, 34, 35, or 36 base pairs in length, such as about 15-30, 15-29, 15-28, 15-27, 15-26, 15-25, 15-24, 15-23, 15-22, 15-21, 15-20, 15-19, 15-18, 15-17, 18-30, 18-29, 18-28, 18-27, 18-26, 18-25, 18-24, 18-23, 18-22, 18-21, 18-20, 19-30, 19-29, 19-28, 19-27, 19-26, 19-25, 19-24, 19-23, 19-22, 19-21, 19-20, 20-30, 20-29, 20-28, 20-27, 20-26, 20-25, 20-24, 20-23, 20-22, 20-21, 21-30, 21-29, 21-28, 21-27, 21-26, 21-25, 21-24, 21-23, or 21-22 base pairs in length. Ranges and lengths intermediate to the above recited ranges and lengths are also contemplated.

[0121] The two strands forming the duplex structure can be different portions of one longer oligonucleotide molecule, or they can be separate oligonucleotide molecules. Where the two strands are part of one larger molecule, and therefore are connected by an uninterrupted chain of linked nucleosides between the 3′-end of one strand and the 5′-end of the respective other strand forming the duplex structure, the connecting chain is referred to as a “hairpin loop.” A hairpin loop can comprise at least one unpaired nucleobase. In some aspects, the hairpin loop can comprise at least 2, at least 3, at least 4, at least 5, at least 6, at least 7, at least 8, at least 9, at least 10, at least 20, at least 23 or more unpaired nucleobases. In some aspects, the hairpin loop can be 10 or fewer linked nucleosides. In some aspects, the hairpin loop can be 8 or fewer unpaired nucleobases. In some aspects, the hairpin loop can be 4-10 unpaired nucleobases. In some aspects, the hairpin loop can be 4-8 linked nucleosides.

[0122] Multiple dsRNAs can be joined together by a linker. The linker can be cleavable or non-cleavable. The dsRNAs can be the same or different.

[0123] In one aspect, each strand of the dsRNA includes 19-23 linked nucleosides that interacts with a target RNA sequence, e.g., an MSH3 target mRNA sequence, to direct the cleavage of the target RNA. Without wishing to be bound by theory, long double stranded RNA introduced into cells is broken down by a Type III endonuclease known as Dicer (Sharp et al. (2001) Genes Dev. 15:485). Dicer, a ribonuclease-III-like enzyme, processes the RNA into 19-23 base pair short interfering RNAs with characteristic two-base 3′ overhangs (Bernstein, et al., (2001) Nature 409:363). The dsRNAs are then incorporated into an RNA-induced silencing complex (RISC) where one or more helicases unwind the dsRNA duplex, enabling the complementary antisense strand to guide target recognition (Nykanen, et al., (2001) Cell 107:309). Upon binding to the appropriate target mRNA, one or more endonucleases within the RISC cleave the target to induce silencing (Elbashir, et al., (2001) Genes Dev. 15:188). Where the two substantially complementary strands of a dsRNA are comprised of separate RNA molecules, those molecules need not, but can be covalently connected. Where the two strands are connected covalently by means other than an uninterrupted chain of nucleotides between the 3′-end of one strand and the 5′-end of the respective other strand forming the duplex structure, the connecting structure is referred to as a “linker.”

[0124] “Linker” or “linking group” means an organic moiety that connects two parts of a compound, e.g., covalently attaches two parts of a compound. The RNA strands can have the same or a different number of linked nucleosides. The maximum number of base pairs is the number of linked nucleosides in the shortest strand of the dsRNA minus any overhangs that are present in the duplex. In addition to the duplex structure, a dsRNA can comprise one or more nucleoside overhangs. In one aspect of the dsRNA, at least one strand comprises a 3′ overhang of at least 1 nucleoside. In another aspect, at least one strand comprises a 3′ overhang of at least 2 linked nucleosides, e.g., 2, 3, 4, 5, 6, 7, 9, 10, 11, 12, 13, 14, or 15 linked nucleosides. In other aspects, at least one strand of the dsRNA comprises a 5′ overhang of at least 1 nucleoside. In some aspects, at least one strand comprises a 5′ overhang of at least 2 linked nucleosides, e.g., 2, 3, 4, 5, 6, 7, 9, 10, 11, 12, 13, 14, or 15 linked nucleosides. In still other aspects, both the 3′ and the 5′ end of one strand of the dsRNA comprise an overhang of at least 1 nucleoside.

[0125] A linker or linking group is a connection between two atoms that links one chemical group or segment of interest to another chemical group or segment of interest via one or more covalent bonds. Conjugate moieties can be attached to the dsRNA directly or through a linking moiety (e.g. linker or tether). Linkers serve to covalently connect a third region, e.g. a conjugate moiety to a dsRNA (e.g. the termini of region A or C). In some aspects, the conjugate or dsRNA conjugate can comprise a linker region which is positioned between the dsRNA and the conjugate moiety. In some aspects, the linker between the conjugate and dsRNA is biocleavable. Phosphodiester containing biocleavable linkers are described in more detail in WO 2014/076195 (herein incorporated by reference).

[0126] As used herein, the term “nucleoside overhang” refers to at least one unpaired nucleobase that protrudes from the duplex structure of a dsRNA. For example, when a 3′-end of one strand of a dsRNA extends beyond the 5′-end of the other strand, or vice versa, there is a nucleoside overhang. A dsRNA can comprise an overhang of at least one nucleoside; alternatively, the overhang can comprise at least two nucleosides, at least three nucleosides, at least four nucleosides, at least five nucleosides or more. A nucleoside overhang can comprise or consist of an alternative nucleoside, including a deoxynucleotide/nucleoside. A nucleoside overhang can comprise or consist of one or more phosphorothioates bonds. The overhang(s) can be on the sense strand, the antisense strand, or any combination thereof. Furthermore, the nucleoside(s) of an overhang can be present on the 5′-end, 3′-end or both ends of either an antisense or sense strand of a dsRNA. In some aspects, the overhang includes a self-complementary portion such that the overhang is capable of forming a hairpin structure that is stable under physiological conditions.

[0127] The terms “blunt” and “blunt ended” mean that there are no unpaired nucleobases at a given terminal end of a dsRNA, i.e., no nucleoside overhang. One or both ends of a dsRNA can be blunt. Where both ends of a dsRNA are blunt, the dsRNA is said to be blunt ended. To be clear, a “blunt ended” dsRNA is a dsRNA that is blunt at both ends, i.e., no nucleoside overhang at either end of the molecule. Most often, such a molecule will be double stranded over its entire length. As used herein, the term “cleavage region” refers to a region that is located immediately adjacent to the cleavage site. The cleavage site is the site on the target at which cleavage occurs. In some aspects, the cleavage region comprises three bases on either end of, and immediately adjacent to, the cleavage site. In some aspects, the cleavage region comprises two bases on either end of, and immediately adjacent to, the cleavage site. In some aspects, the cleavage site specifically occurs at the site bound by nucleosides 10 and 11 of the antisense strand, and the cleavage region comprises nucleosides 11, 12, and 13.

[0128] The term “contiguous nucleobase region” refers to the region of the dsRNA (e.g., the antisense strand of the dsRNA) which is complementary to the target nucleic acid. The term can be used interchangeably herein with the term “contiguous nucleotide sequence” or “contiguous nucleobase sequence.” In some aspects, all the nucleotides of the dsRNA are present in the contiguous nucleotide or nucleoside region. In some aspects, the dsRNA comprises the contiguous nucleotide region and can comprise further nucleotide(s) or nucleoside(s), for example a nucleotide linker region which can be used to attach a functional group to the contiguous nucleotide sequence. The nucleotide linker region can be complementary to the target nucleic acid. In some aspects, the internucleoside linkages present between the nucleotides of the contiguous nucleotide region are all phosphorothioate internucleoside linkages. In some aspects, the contiguous nucleotide region comprises one or more sugar-modified nucleosides.

[0129] As used herein, and unless otherwise indicated, the term “complementary,” when used to describe a first nucleotide or nucleoside sequence in relation to a second nucleotide or nucleoside sequence, refers to the ability of an oligonucleotide or polynucleotide comprising the first nucleotide or nucleoside sequence to hybridize and form a duplex structure under certain conditions with an oligonucleotide or polynucleotide comprising the second nucleotide sequence, as will be understood by the skilled person. Such conditions can, for example, be stringent conditions, where stringent conditions can include: 400 mM NaCl, 40 mM PIPES pH 6.4, 1 mM EDTA, 50° C., or 70° C., for 12-16 hours followed by washing (see, e.g., “Molecular Cloning: A Laboratory Manual, Sambrook, et al. (1989) Cold Spring Harbor Laboratory Press). Other conditions, such as physiologically relevant conditions as can be encountered inside an organism, can be used. The skilled person will be able to determine the set of conditions most appropriate for a test of complementarity of two sequences in accordance with the ultimate application of the hybridized nucleotides or nucleosides.

[0130] “Complementary” sequences, as used herein, can include, or be formed entirely from, non-Watson-Crick base pairs and/or base pairs formed from non-natural and alternative nucleotides or nucleosides, in so far as the above requirements with respect to their ability to hybridize are fulfilled. Such non-Watson-Crick base pairs include, but are not limited to, G:U Wobble or Hoogstein base pairing. Complementary sequences within a dsRNA, or between an oligonucleotide and a target sequence as described herein, include base-pairing of the oligonucleotide or polynucleotide comprising a first nucleotide or nucleoside sequence to an oligonucleotide or polynucleotide comprising a second nucleotide or nucleoside sequence over the entire length of one or both nucleotide or nucleoside sequences. Such sequences can be referred to as “fully complementary” with respect to each other herein. However, where a first sequence is referred to as “substantially complementary” with respect to a second sequence herein, the two sequences can be fully complementary, or they can form one or more, but generally not more than 5, 4, 3 or 2 mismatched base pairs upon hybridization for a duplex up to 30 base pairs, while retaining the ability to hybridize under the conditions most relevant to their ultimate application, e.g., inhibition of gene expression via a RISC pathway. “Substantially complementary” can refer to a polynucleotide that is substantially complementary to a contiguous portion of the mRNA of interest (e.g., an mRNA encoding MSH3). For example, a polynucleotide is complementary to at least a part of an MSH3 mRNA if the sequence is substantially complementary to a non-interrupted portion of an mRNA encoding MSH3. However, where two oligonucleotides are designed to form, upon hybridization, one or more single stranded overhangs, such overhangs shall not be regarded as mismatches with regard to the determination of complementarity. For example, a dsRNA comprising one oligonucleotide of 21 linked nucleosides in length and another oligonucleotide of 23 nucleosides in length, wherein the longer oligonucleotide comprises a sequence of 21 linked nucleosides that is fully complementary to the shorter oligonucleotide, can be referred to as “fully complementary” for the purposes described herein.

[0131] As used herein, the term “region of complementarity” refers to the region on the oligonucleotide that is substantially complementary to all or a portion of a gene, primary transcript, a sequence (e.g., a target sequence, e.g., an MSH3 nucleotide sequence), or processed mRNA, so as to interfere with expression of the endogenous gene (e.g., MSH3). Where the region of complementarity is not fully complementary to the target sequence, the mismatches can be in the internal or terminal regions of the molecule. Generally, the most tolerated mismatches are in the terminal regions, e.g., within 5, 4, 3, or 2 nucleotides of the 5′- and/or 3′-terminus of the oligonucleotide.

[0132] As used herein, an “agent that reduces the level and/or activity of MSH3” refers to any polynucleotide agent (e.g., a dsRNA) that reduces the level of or inhibits expression of MSH3 in a cell or subject. By “reducing the level of MSH3,” “reducing expression of MSH3,” and “reducing transcription of MSH3” is meant decreasing the level, decreasing the expression, or decreasing the transcription of MSH3 in a cell or subject, e.g., by administering a dsRNA to the cell or subject. The level of MSH3 can be measured using any method known in the art (e.g., by measuring the levels of MSH3 mRNA or levels of MSH3 protein in a cell or a subject). The reduction can be a decrease in the level, expression, or transcription of MSH3 of about 5% or more (e.g., about 10%, 20%, 30%, 40%, 50%, 60%, 70%, 80%, 90%, 95%, 96%, 97%, 98%, 99%, or 100%) in a cell or subject compared to prior to treatment. The MSH3 can be any MSH3 gene (such as, e.g., a mouse MSH3 gene, a rat MSH3 gene, a monkey MSH3 gene, or a human MSH3 gene) as well as variants or mutants of a MSH3 gene that encode a MSH3 protein. Thus, the MSH3 gene can be a wild-type MSH3 gene, a mutant MSH3 gene, or a transgenic MSH3 gene in the context of a genetically manipulated cell, group of cells, or organism.

[0133] By “reducing the activity of MSH3” is meant decreasing the level of an activity related to MSH3 (e.g., by reducing the amount of nucleotide repeats in a gene associated with a nucleotide repeat expansion disorder, e.g., a trinucleotide repeat expansion disorder, that is related to MSH3 activity). The activity level of MSH3 can be measured using any method known in the art (e.g., by directly sequencing a gene associated with a nucleotide repeat expansion disorder to measure the levels of nucleotide repeats).

[0134] By “reducing the level of MSH3” is meant decreasing the level of MSH3 in a cell or subject, e.g., by administering an oligonucleotide, or pharmaceutically acceptable salt thereof, to the cell or subject. The level of MSH3 can be measured using any method known in the art (e.g., by measuring the levels of MSH3 mRNA or levels of MSH3 protein in a cell or a subject).

[0135] By “modulating the activity of a MutSβ heterodimer comprising MSH3” is meant altering the level of an activity related to a MutSβ heterodimer, or a related downstream effect. The activity level of a MutSβ heterodimer can be measured using any method known in the art.

[0136] As used herein, the term “inhibitor” refers to any agent which reduces the level and/or activity of a protein (e.g., MSH3). Non-limiting examples of inhibitors include polynucleotides (e.g., dsRNA, e.g., siRNA or shRNA). The term “inhibiting,” as used herein, is used interchangeably with “reducing,” “silencing,” “downregulating,” “suppressing,” and other similar terms, and includes any level of inhibition.

[0137] The phrase “contacting a cell with a dsRNA,” as used herein, includes contacting a cell by any possible means. Contacting a cell with a dsRNA includes contacting a cell in vitro with the dsRNA or contacting a cell in vivo with the dsRNA. The contacting can be done directly or indirectly. Thus, for example, the dsRNA can be put into physical contact with the cell by the individual performing the method, or alternatively, the dsRNA agent can be put into a situation that will permit or cause it to subsequently come into contact with the cell.

[0138] Contacting a cell in vitro can be done, for example, by incubating the cell with the dsRNA. Contacting a cell in vivo can be done, for example, by injecting the dsRNA into or near the tissue where the cell is located, or by injecting the dsRNA agent into another area, e.g., the bloodstream or the subcutaneous space, such that the agent will subsequently reach the tissue where the cell to be contacted is located. For example, the dsRNA can contain and/or be coupled to a ligand that directs the dsRNA to a site of interest. Combinations of in vitro and in vivo methods of contacting are also possible. For example, a cell can be contacted in vitro with a dsRNA and subsequently transplanted into a subject.

[0139] In one aspect, contacting a cell with a dsRNA includes “introducing” or “delivering the dsRNA into the cell” by facilitating or effecting uptake or absorption into the cell. Absorption or uptake of a dsRNA can occur through unaided diffusive or active cellular processes, or by auxiliary agents or devices. Introducing a dsRNA into a cell can be in vitro and/or in vivo. For example, for in vivo introduction, dsRNA can be injected into a tissue site or administered systemically. In vitro introduction into a cell includes methods known in the art such as electroporation and lipofection. Further approaches are described herein below and/or are known in the art.

[0140] As used herein, “lipid nanoparticle” or “LNP” is a vesicle comprising a lipid layer encapsulating a pharmaceutically active molecule, such as a nucleic acid molecule, e.g., a dsRNA or a plasmid from which a dsRNA is transcribed. LNP refers to a stable nucleic acid-lipid particle. LNPs typically contain a cationic lipid, a non-cationic lipid, and a lipid that prevents aggregation of the particle (e.g., a PEG-lipid conjugate). LNPs are described in, for example, U.S. Pat. Nos. 6,858,225; 6,815,432; 8,158,601; and 8,058,069, the entire contents of which are hereby incorporated herein by reference.

[0141] As used herein, the term “liposome” refers to a vesicle composed of amphiphilic lipids arranged in at least one bilayer, e.g., one bilayer or a plurality of bilayers. Liposomes include unilamellar and multilamellar vesicles that have a membrane formed from a lipophilic material and an aqueous interior. The aqueous portion contains the dsRNA composition. The lipophilic material isolates the aqueous interior from an aqueous exterior, which typically does not include the dsRNA composition, although in some examples, it can. Liposomes also include “sterically stabilized” liposomes, a term which, as used herein, refers to liposomes comprising one or more specialized lipids that, when incorporated into liposomes, result in enhanced circulation lifetimes relative to liposomes lacking such specialized lipids.

[0142] “Micelles” are defined herein as a particular type of molecular assembly in which amphipathic molecules are arranged in a spherical structure such that all the hydrophobic portions of the molecules are directed inward, leaving the hydrophilic portions in contact with the surrounding aqueous phase. The converse arrangement exists if the environment is hydrophobic.

[0143] As used herein, the terms “effective amount,” “therapeutically effective amount,” and a “sufficient amount” of an agent that reduces the level and/or activity of MSH3 (e.g., in a cell or a subject) described herein refer to a quantity sufficient to, when administered to the subject, including a human, effect beneficial or desired results, including clinical results, and, as such, an “effective amount” or synonym thereto depends on the context in which it is being applied. For example, in the context of treating a nucleotide repeat expansion disorder (e.g., a trinucleotide repeat expansion disorder), it is an amount of the agent that reduces the level and/or activity of MSH3 sufficient to achieve a treatment response as compared to the response obtained without administration of the agent that reduces the level and/or activity of MSH3. The amount of a given agent that reduces the level and/or activity of MSH3 described herein that will correspond to such an amount will vary depending upon various factors, such as the given agent, the pharmaceutical formulation, the route of administration, the type of disease or disorder, the identity of the subject (e.g., age, sex, and/or weight) or host being treated, and the like, but can nevertheless be routinely determined by one of skill in the art. Also, as used herein, a “therapeutically effective amount” of an agent that reduces the level and/or activity of MSH3 of the present disclosure is an amount which results in a beneficial or desired result in a subject as compared to a control. As defined herein, a therapeutically effective amount of an agent that reduces the level and/or activity of MSH3 of the present disclosure can be readily determined by one of ordinary skill by routine methods known in the art. Dosage regimen can be adjusted to provide the optimum therapeutic response.

[0144] “Prophylactically effective amount,” as used herein, is intended to include the amount of a dsRNA that, when administered to a subject having or predisposed to have a nucleotide repeat expansion disorder (e.g., a trinucleotide repeat expansion disorder), is sufficient to prevent or ameliorate the disease or one or more symptoms of the disease. Ameliorating the disease includes slowing the course of the disease or reducing the severity of later-developing disease. The “prophylactically effective amount” can vary depending on the dsRNA, how the agent is administered, the degree of risk of disease, and the history, age, weight, family history, genetic makeup, the types of preceding or concomitant treatments, if any, and other individual characteristics of the patient to be treated. A prophylactically effective amount can refer to, for example, an amount of the agent that reduces the level and/or activity of MSH3 (e.g., in a cell or a subject) described herein or can refer to a quantity sufficient to, when administered to the subject, including a human, delay the onset of one or more of the nucleotide repeat expansion disorders (e.g., trinucleotide repeat expansion disorders) described herein by at least 120 days, for example, at least 6 months, at least 12 months, at least 2 years, at least 3 years, at least 4 years, at least 5 years, at least 10 years or more, when compared with the predicted onset.

[0145] A “therapeutically-effective amount” or “prophylactically effective amount” also includes an amount (either administered in a single or in multiple doses) of a dsRNA that produces some desired local or systemic effect at a reasonable benefit/risk ratio applicable to any treatment. dsRNAs employed in the methods herein can be administered in a sufficient amount to produce a reasonable benefit/risk ratio applicable to such treatment.

[0146] As used herein, the term “region of complementarity” refers to the region on the antisense strand that is substantially complementary to all or a portion of a gene, primary transcript, a sequence (e.g., a target sequence, e.g., an MSH3 nucleotide sequence), or processed mRNA, so as to interfere with expression of the endogenous gene (e.g., MSH3). Where the region of complementarity is not fully complementary to the target sequence, the mismatches can be in the internal or terminal regions of the molecule. Generally, the most tolerated mismatches are in the terminal regions, e.g., within 5, 4, 3, or 2 nucleotides of the 5′- and/or 3′-terminus of the dsRNA.

[0147] An “amount effective to reduce nucleotide repeat expansion” of a particular gene refers to an amount of the agent that reduces the level and/or activity of MSH3 (e.g., in a cell or a subject) described herein or to a quantity sufficient to, when administered to the subject, including a human, to reduce the nucleotide repeat expansion of a particular gene (e.g., a gene associated with a nucleotide repeat expansion disorder, e.g., a trinucleotide repeat expansion disorder described herein).

[0148] As used herein, the term “a subject identified as having a nucleotide repeat expansion disorder” refers to a subject identified as having a molecular or pathological state, disease or condition of or associated with a nucleotide repeat expansion disorder, such as the identification of a nucleotide repeat expansion disorder or symptoms thereof, or to identification of a subject having or suspected of having a nucleotide repeat expansion disorder who can benefit from a particular treatment regimen.

[0149] As used herein, “trinucleotide repeat expansion disorder” refers to a class of genetic diseases or disorders characterized by excessive trinucleotide repeats (e.g., trinucleotide repeats such as CAG) in a gene or intron in the subject which exceed the normal, stable threshold, for the gene or intron. Nucleotide repeats are common in the human genome and are not normally associated with disease. In some cases, however, the number of repeats expands beyond a stable threshold and can lead to disease, with the severity of symptoms generally correlated with the number of repeats. Nucleotide repeat expansion disorders include “polyglutamine” and “non-polyglutamine” disorders.

[0150] By “determining the level of a protein” is meant the detection of a protein, or an mRNA encoding the protein, by methods known in the art either directly or indirectly. “Directly determining” means performing a process (e.g., performing an assay or test on a sample or “analyzing a sample” as that term is defined herein) to obtain the physical entity or value. “Indirectly determining” refers to receiving the physical entity or value from another party or source (e.g., a third-party laboratory that directly acquired the physical entity or value). Methods to measure protein level generally include, but are not limited to, western blotting, immunoblotting, enzyme-linked immunosorbent assay (ELISA), radioimmunoassay (RIA), immunoprecipitation, immunofluorescence, surface plasmon resonance, chemiluminescence, fluorescent polarization, phosphorescence, immunohistochemical analysis, matrix-assisted laser desorption/ionization time-of-flight (MALDI-TOF) mass spectrometry, liquid chromatography (LC)-mass spectrometry, microcytometry, microscopy, fluorescence activated cell sorting (FACS), and flow cytometry, as well as assays based on a property of a protein including, but not limited to, enzymatic activity or interaction with other protein partners. Methods to measure mRNA levels are known in the art.

[0151] “Percent (%) sequence identity” with respect to a reference polynucleotide or polypeptide sequence is defined as the percentage of nucleic acids or amino acids in a candidate sequence that are identical to the nucleic acids or amino acids in the reference polynucleotide or polypeptide sequence, after aligning the sequences and introducing gaps (DNA core sequences), if necessary, to achieve the maximum percent sequence identity. Alignment for purposes of determining percent nucleic acid or amino acid sequence identity can be achieved in various ways that are within the capabilities of one of skill in the art, for example, using publicly available computer software such as BLAST, BLAST-2, or Megalign software. Those skilled in the art can determine appropriate parameters for aligning sequences, including any algorithms needed to achieve maximal alignment over the full length of the sequences being compared. For example, percent sequence identity values can be generated using the sequence comparison computer program BLAST. As an illustration, the percent sequence identity of a given nucleic acid or amino acid sequence, A, to, with, or against a given nucleic acid or amino acid sequence, B, (which can alternatively be phrased as a given nucleic acid or amino acid sequence, A that has a certain percent sequence identity to, with, or against a given nucleic acid or amino acid sequence, B) is calculated as follows:

100 multiplied by (the fraction X/Y)

where X is the number of nucleotides or amino acids scored as identical matches by a sequence alignment program (e.g., BLAST) in that program's alignment of A and B, and where Y is the total number of nucleic acids in B. It will be appreciated that where the length of nucleic acid or amino acid sequence A is not equal to the length of nucleic acid or amino acid sequence B, the percent sequence identity of A to B will not equal the percent sequence identity of B to A.

[0152] By “level” is meant a level or activity of a protein, or mRNA encoding the protein (e.g., MSH3), optionally as compared to a reference. The reference can be any useful reference, as defined herein. By a “decreased level” or an “increased level” of a protein is meant a decrease or increase in protein level, as compared to a reference (e.g., a decrease or an increase by about 5%, about 10%, about 15%, about 20%, about 25%, about 30%, about 35%, about 40%, about 45%, about 50%, about 55%, about 60%, about 65%, about 70%, about 75%, about 80%, about 85%, about 90%, about 95%, about 100%, about 150%, about 200%, about 300%, about 400%, about 500%, or more; a decrease or an increase of more than 10%, 15%, 20%, 50%, 75%, 100%, or 200%, as compared to a reference; a decrease or an increase by less than about 0.01-fold, about 0.02-fold, about 0.1-fold, about 0.3-fold, about 0.5-fold, about 0.8-fold, or less; or an increase by more than about 1.2-fold, about 1.4-fold, about 1.5-fold, about 1.8-fold, about 2.0-fold, about 3.0-fold, about 3.5-fold, about 4.5-fold, about 5.0-fold, about 10-fold, about 15-fold, about 20-fold, about 30-fold, about 40-fold, about 50-fold, about 100-fold, about 1000-fold, or more). A level of a protein can be expressed in mass/vol (e.g., g/dL, mg/mL, μg/mL, ng/mL) or percentage relative to total protein or mRNA in a sample.

[0153] The term “pharmaceutical composition,” as used herein, represents a composition containing a compound described herein formulated with a pharmaceutically acceptable excipient, and can be manufactured or sold with the approval of a governmental regulatory agency as part of a therapeutic regimen for the treatment of disease in a mammal. Pharmaceutical compositions can be formulated, for example, for oral administration in unit dosage form (e.g., a tablet, capsule, caplet, gelcap, or syrup); for topical administration (e.g., as a cream, gel, lotion, or ointment); for intravenous administration (e.g., as a sterile solution free of particulate emboli and in a solvent system suitable for intravenous use); for intrathecal injection; for intracerebroventricular injections; for intraparenchymal injection; for intraocular administration (e.g., for intravitreal or subretinal administration); or in any other pharmaceutically acceptable formulation.

[0154] In some aspects, provided herein are pharmaceutical compositions that are formulated for intracerebroventricular injection.

[0155] A “pharmaceutically acceptable excipient,” as used herein, refers to any ingredient other than the compounds described herein (for example, a vehicle capable of suspending or dissolving the active compound) and having the properties of being substantially nontoxic and non-inflammatory in a patient. Excipients can include, for example: antiadherents, antioxidants, binders, coatings, compression aids, disintegrants, dyes (colors), emollients, emulsifiers, fillers (diluents), film formers or coatings, flavors, fragrances, glidants (flow enhancers), lubricants, preservatives, printing inks, sorbents, suspensing or dispersing agents, sweeteners, and waters of hydration. Exemplary excipients include, but are not limited to: butylated hydroxytoluene (BHT), calcium carbonate, calcium phosphate (dibasic), calcium stearate, croscarmellose, crosslinked polyvinyl pyrrolidone, citric acid, crospovidone, cysteine, ethylcellulose, gelatin, hydroxypropyl cellulose, hydroxypropyl methylcellulose, lactose, magnesium stearate, maltitol, mannitol, methionine, methylcellulose, methyl paraben, microcrystalline cellulose, polyethylene glycol, polyvinyl pyrrolidone, povidone, pregelatinized starch, propyl paraben, retinyl palmitate, shellac, silicon dioxide, sodium carboxymethyl cellulose, sodium citrate, sodium starch glycolate, sorbitol, starch (corn), stearic acid, sucrose, talc, titanium dioxide, vitamin A, vitamin E, vitamin C, and xylitol.

[0156] As used herein, the term “pharmaceutically acceptable salt” means any pharmaceutically acceptable salt of the compound of any of the compounds described herein. For example, pharmaceutically acceptable salts of any of the compounds described herein include those that are within the scope of sound medical judgment, suitable for use in contact with the tissues of humans and animals without undue toxicity, irritation, allergic response and are commensurate with a reasonable benefit/risk ratio. Pharmaceutically acceptable salts are well known in the art. For example, pharmaceutically acceptable salts are described in: Berge et al., J. Pharmaceutical Sciences 66:1-19, 1977 and in Pharmaceutical Salts: Properties, Selection, and Use, (Eds. P. H. Stahl and C. G. Wermuth), Wiley-VCH, 2008. The salts can be prepared in situ during the final isolation and purification of the compounds described herein or separately by reacting a free base group with a suitable organic acid.

[0157] The compounds described herein can have ionizable groups so as to be capable of preparation as pharmaceutically acceptable salts. These salts can be acid addition salts involving inorganic or organic acids or the salts can, in the case of acidic forms of the compounds described herein, be prepared from inorganic or organic bases. Frequently, the compounds are prepared or used as pharmaceutically acceptable salts prepared as addition products of pharmaceutically acceptable acids or bases. Suitable pharmaceutically acceptable acids and bases and methods for preparation of the appropriate salts are well-known in the art. Salts can be prepared from pharmaceutically acceptable non-toxic acids and bases including inorganic and organic acids and bases. Representative acid addition salts include acetate, adipate, alginate, ascorbate, aspartate, benzenesulfonate, benzoate, bisulfate, borate, butyrate, camphorate, camphorsulfonate, citrate, cyclopentanepropionate, digluconate, dodecylsulfate, ethanesulfonate, fumarate, glucoheptonate, glycerophosphate, hemisulfate, heptonate, hexanoate, hydrobromide, hydrochloride, hydroiodide, 2-hydroxy-ethanesulfonate, lactobionate, lactate, laurate, lauryl sulfate, malate, maleate, malonate, methanesulfonate, 2-naphthalenesulfonate, nicotinate, nitrate, oleate, oxalate, palmitate, pamoate, pectinate, persulfate, 3-phenylpropionate, phosphate, picrate, pivalate, propionate, stearate, succinate, sulfate, tartrate, thiocyanate, toluenesulfonate, undecanoate, and valerate salts. Representative alkali or alkaline earth metal salts include sodium, lithium, potassium, calcium, and magnesium, as well as nontoxic ammonium, quaternary ammonium, and amine cations, including, but not limited to ammonium, tetramethylammonium, tetraethylammonium, methylamine, dimethylamine, trimethylamine, triethylamine, and ethylamine.

[0158] By a “reference” is meant any useful reference used to compare protein or mRNA levels or activity. The reference can be any sample, standard, standard curve, or level that is used for comparison purposes. The reference can be a normal reference sample or a reference standard or level. A “reference sample” can be, for example, a control, e.g., a predetermined negative control value such as a “normal control” or a prior sample taken from the same subject; a sample from a normal healthy subject, such as a normal cell or normal tissue; a sample (e.g., a cell or tissue) from a subject not having a disease; a sample from a subject that is diagnosed with a disease, but not yet treated with a compound described herein; a sample from a subject that has been treated by a compound described herein; or a sample of a purified protein (e.g., any described herein) at a known normal concentration. By “reference standard or level” is meant a value or number derived from a reference sample. A “normal control value” is a pre-determined value indicative of non-disease state, e.g., a value expected in a healthy control subject. Typically, a normal control value is expressed as a range (“between X and Y”), a high threshold (“no higher than X”), or a low threshold (“no lower than X”). A subject having a measured value within the normal control value for a particular biomarker is typically referred to as “within normal limits” for that biomarker. A normal reference standard or level can be a value or number derived from a normal subject not having a disease or disorder (e.g., a nucleotide or trinucleotide repeat expansion disorder); a subject that has been treated with a compound described herein. In some aspects, the reference sample, standard, or level is matched to the sample subject sample by at least one of the following criteria: age, weight, sex, disease stage, and overall health. A standard curve of levels of a purified protein, e.g., any described herein, within the normal reference range can be used as a reference.

[0159] As used herein, the term “subject” refers to any organism to which a composition can be administered, e.g., for experimental, diagnostic, prophylactic, and/or therapeutic purposes. Typical subjects include any animal (e.g., mammals such as mice, rats, rabbits, non-human primates, and humans). A subject can seek or be in need of treatment, require treatment, be receiving treatment, be receiving treatment in the future, or be a human or animal who is under care by a trained professional for a particular disease or condition.

[0160] As used herein, the terms “treat,” “treated,” and “treating” mean both therapeutic treatment and prophylactic or preventative measures wherein the object is to prevent or slow down (lessen) an undesired physiological condition, disorder, or disease, or obtain beneficial or desired clinical results. Beneficial or desired clinical results include, but are not limited to, alleviation of symptoms; diminishment of the extent of a condition, disorder, or disease; stabilized (i.e., not worsening) state of condition, disorder, or disease; delay in onset or slowing of condition, disorder, or disease progression; amelioration of the condition, disorder, or disease state or remission (whether partial or total), whether detectable or undetectable; an amelioration of at least one measurable physical parameter, not necessarily discernible by the patient; or enhancement or improvement of condition, disorder, or disease. Treatment includes eliciting a clinically significant response without excessive levels of side effects. Treatment also includes prolonging survival as compared to expected survival if not receiving treatment.

[0161] As used herein, the terms “variant” and “derivative” are used interchangeably and refer to naturally-occurring, synthetic, and semi-synthetic analogues of a compound, peptide, protein, or other substance described herein. A variant or derivative of a compound, peptide, protein, or other substance described herein can retain or improve upon the biological activity of the original material.

[0162] The details of one or more aspects are set forth in the description below. Other features, objects, and advantages will be apparent from the description and from the claims.

### DETAILED DESCRIPTION

[0163] The present inventors have found that inhibition or depletion of MSH3 level and/or activity in a cell is effective in the treatment of a nucleotide repeat expansion disorder (e.g., a trinucleotide repeat expansion disorder). Accordingly, useful compositions and methods to treat nucleotide repeat expansion disorders (e.g., a trinucleotide repeat expansion disorders), e.g., in a subject in need thereof are provided herein.

### I. Nucleotide Repeat Expansion Disorders

[0164] Nucleotide repeat expansion disorders (e.g., trinucleotide repeat expansion disorders) are a family of genetic disorders characterized by the pathogenic expansion of a repeat region within a genomic region. In such disorders, the number of repeats exceeds that of a gene's normal, stable threshold, expanding into a diseased range.

[0165] Nucleotide repeat expansion disorders (e.g., trinucleotide repeat expansion disorders) generally can be categorized as “polyglutamine” or “non-polyglutamine.” Polyglutamine disorders, including Huntington's disease (HD) and several spinocerebellar ataxias, are caused by a CAG (glutamine) repeats in the protein-coding regions of specific genes. Non-polyglutamine disorders are more heterogeneous and can be caused by CAG nucleotide repeat expansions in non-coding regions, as in Myotonic dystrophy, or by the expansion of nucleotide repeats other than CAG that can be in coding or non-coding regions such as the CGG repeat expansion responsible for Fragile X Syndrome.

[0166] Nucleotide repeat expansion disorders (e.g., trinucleotide repeat expansion disorders) are dynamic in the sense that the number of repeats can vary from generation-to-generation, or even from cell-to-cell in the same individual. Repeat expansion is believed to be caused by polymerase “slipping” during DNA replication. Tandem repeats in the DNA sequence can “loop out” while maintaining complementary base pairing between the parent strand and daughter strands. If the loop structure is formed from the daughter strand, the number of repeats will increase.

[0167] Conversely, if the loop structure is formed from the parent strand, the number of repeats will decrease. It appears that expansion is more common than reduction. In general, the length of repeat expansion is negatively correlated with prognosis; longer repeats are correlated with an earlier age of onset and worsened disease severity. Thus, nucleotide repeat expansion disorders (e.g., trinucleotide repeat expansion disorders) are subject to “anticipation,” meaning the severity of symptoms and/or age of onset worsen through successive generations of affected families due to the expansion of these repeats from one generation to the next.

[0168] Nucleotide repeat expansion disorders (e.g., trinucleotide repeat expansion disorders) are well known in the art. For example, frontotemporal dementia (FTD) is a hexanucleotide repeat string of nucleotides GGGGCC that is repeated many more times in an individual than an individual without FTD. Additionally, an individual having spinocerebellar ataxia type 36 (SCA36) has many more GGCCTG repeats than an individual without SCA36.

[0169] Exemplary trinucleotide repeat expansion disorders and the trinucleotide repeats of the genes commonly associated with them are included in Table 1.

TABLE 1
Exemplary Trinucleotide Repeat Expansion Disorders

| | | Nucleotide |
|---|---|---|
| Disorder | Gene | Repeat |
| ARX-nonsyndromic X-linked | ARX | GCG |
| mental retardation (XLMR) | | |
| Baratela-Scott Syndrome | XYLT1 | GGC |
| Blepharophimosis/Ptosis (BPES) | FOXL2 | GCG |
| Epicanthus inversus syndrome | | |
| (BPES) types I and II | | |
| Cleidocranial dysplasia (CCD) | RUNX2 | GCG |
| Congenital central hypoventilation | PHOX-2B | GCG |
| Congenital central hypoventilation | PHOX2B | GCG |
| syndrome (CCHS) | | |
| Creutzfeldt-Jakob disease | PRNP | |
| Dentatorubral-pallidoluysian | ATN1 | CAG |
| atrophy (DRPLA)/Haw River | | |
| syndrome | | |
| Early infantile epileptic | ARX | GCG |
| encephalopathy (Ohtahara | | |
| syndrome) | | |
| FRA2A syndrome | AFF3 | CGC |
| FRA7A syndrome | ZNF713 | CGG |
| Fragile X mental retardation | AFF2/FMR2 | GCC |
| (FRAX-E) | | |
| Fragile X Syndrome (FXS) | FMR1 | CGG |
| Fragile X-associated Primary | FMR1 | CGG |
| Ovarian Insufficiency (FXPOI) | | |
| Fragile X-associated Tremor Ataxia | FMR1 | CGG |
| Syndrome (FXTAS) | | |
| Friedreich ataxia (FRDA) | FXN | GAA |
| Fuchs' Corneal Endothelial | TCF4 | CTG |
| Dystrophy (FECD) | | |
| Hand-foot genital syndrome (HFGS) | HOXA13 | GCG |
| Holoprosencephaly disorder (HPE) | ZIC2 | GCG |
| Huntington disease-like 2 (HDL2) | JPH3 | CTG |
| Huntington's Disease (HD) | HTT | CAG |
| Infantile spasm syndrome/West | ARX | GCG |
| syndrome (ISS) | | |
| KCNN3-associated (e.g., | KCNN3 | CAG |
| schizophrenia) | | |
| Multiple Skeletal dysplasias | COMP | GAC |
| Myotonic Dystrophy type 1 (DM1) | DMPK | CTG |
| Myotonic Dystrophy type 2 (DM2) | CNBP | CCTG |
| NCOA3-associated (e.g., increased | NCOA3 | CAG |
| risk of prostate cancer) | | |
| Neuronal intranuclear inclusion | NOTCH2NLC | GGC |
| disease (NIID) | | |
| Oculopharyngeal Muscular | PABPN1 | GCG |
| Dystrophy (OPMD) | | |
| Spinal Muscular Bulbar Atrophy | AR | CAG |
| (SMBA) | | |
| Spinocerebellar ataxia type 1 | ATXN1 | CAG |
| (SCA1) | | |
| Spinocerebellar ataxia type 10 | ATXN10 | ATTCT |
| (SCA10) | | |
| Spinocerebellar ataxia type 12 | PPP2R2B | CAG |
| (SCA12) | | |
| Spinocerebellar ataxia type 17 | TBP/ATXN17 | CAG |
| (SCA17) | | |
| Spinocerebellar ataxia type 2 | ATXN2 | CAG |
| (SCA2) | | |
| Spinocerebellar ataxia type 3 | ATXN3 | CAG |
| (SCA3)/Machado-Joseph Disease | | |
| Spinocerebellar ataxia type 45 | FAT2 | CAG |
| (SCA45) | | |
| Spinocerebellar ataxia type 6 | CACNA1A | CAG |
| (SCA6) | | |
| Spinocerebellar ataxia type 7 | ATXN7 | CAG |
| (SCA7) | | |
| Spinocerebellar ataxia type 8 | ATXN8 | CTG |
| (SCA8) | | |
| Syndromic neurodevelopmental | MAB21L1 | CAG |
| disorder with cerebellar, ocular, | | |
| craniofacial, and genital features | | |
| (COFG syndrome) | | |
| Synpolydactyly (SPD I) | HOXD13 | GCG |
| Synpolydactyly (SPD II) | HOXD12 | GCG |

[0170] The proteins associated with nucleotide repeat expansion disorders (e.g., trinucleotide repeat expansion disorders) are typically selected based on an experimental association of the protein associated with a nucleotide repeat expansion disorders (e.g., trinucleotide repeat expansion disorder) to a nucleotide repeat expansion disorder. For example, the production rate or circulating concentration of a protein associated with a nucleotide repeat expansion disorder (e.g., trinucleotide repeat expansion disorder) can be elevated or depressed in a population having a nucleotide repeat expansion disorder (e.g., a trinucleotide repeat expansion disorder) relative to a population lacking the nucleotide repeat expansion disorder (e.g., a trinucleotide repeat expansion disorder). Differences in protein levels can be assessed using proteomic techniques including but not limited to Western blot, immunohistochemical staining, enzyme linked immunosorbent assay (ELISA), and mass spectrometry. Alternatively, the proteins associated with nucleotide repeat expansion disorder (e.g., trinucleotide repeat expansion disorders) can be identified by obtaining gene expression profiles of the genes encoding the proteins using genomic techniques including, but not limited to, DNA microarray analysis, serial analysis of gene expression (SAGE), and quantitative real-time polymerase chain reaction (qPCR).

### II. Evidence for the Involvement of Mismatch Repair Pathway in Nucleotide Repeat Expansion

[0171] There is growing evidence that DNA repair pathways, particularly mismatch repair (MMR), are involved in the expansion of nucleotide repeats (e.g., trinucleotide repeats (Liu & Wilson (2012) Trends Biochem Sci. 37: 162-172). A recent genome-wide association (GWA) analysis led to the identification of loci harboring genetic variations that alter the age at neurological onset of Huntington's disease (HD) (GEM-HD Consortium, Cell. 2015 Jul. 30; 162(3):516-26). The study identified MLH1, the human homolog of the E. coli DNA mismatch repair gene mutL. A subsequent GWA study in polyglutamine disease patients found significant association of age at onset when grouping all polyglutamine diseases (HD and SCAs) with DNA repair genes as a group, as well as significant associations for specific SNPs in FAN1 and PMS2 with the diseases (Bettencourt et al., (2016) Ann. Neurol., 79: 983-990). These results were consistent with those from an earlier study comparing differences in repeat expansion in two different mouse models of Huntington's Disease, which identified Mlh1 and Mlh3 as novel critical modifiers of CAG instability (Pinto et al., (2013) Mismatch Repair Genes Mlh1 and Mlh3 Modify CAG Instability in Huntington's Disease Mice: Genome-Wide and Candidate Approaches. PLoS Genet 9(10): e1003930). Another member of the mismatch repair pathway, 8-oxo-guanine glycosylase (OGG1) has also been implicated in expansion, as somatic expansion was found to be reduced in transgenic mice lacking OGG1 (Kovtun I. V. et al. (2007) Nature 447, 447-452). However, another study found that human subjects containing a Ser326Cys polymorphism in hOGG1, which results in reduced OGG1 activity, results in increased mutant huntingtin (Coppede et al., (2009) Toxicol., 278: 199-203). Likewise, complete inactivation of Fan1, another component of the DNA repair pathway, in a mouse HD model produces somatic CAG expansions (Long et al. (2018) J. Hum Genet., 103: 1-9). MSH3, another component of the mismatch repair pathway, has been reported to be linked to somatic expansion: polymorphisms in Msh3 was associated with somatic instability of the expanded CTG trinucleotide repeat in myotonic dystrophy type 1 (DM1) patients (Morales et al., (2016) DNA Repair 40: 57-66). Furthermore, natural polymorphisms in Msh3 and Mlh1 have been revealed as mediators of mouse strain specific differences in CTG⋅CAG repeat instability (Pinto et al. (2013) ibid; Tome et al., (2013) PLoS Genet. 9 e1003280). Likewise, mice lacking MSH2 or MSH3 have attenuated expansion in the human HD gene (Manley et al., (1999) Nat. Genet. 23, 471-473), the human myotonic dystrophy 1 protein kinase transgene (van den Broek et al. (2002) Hum. Mol. Genet. 11, 191-198), the FAX gene in Friedreich's ataxia (FRDA) (Bourn et al. (2012) PLoS One 7, e47085) and the fragile mental retardation gene in fragile X syndrome (FXS) (Lokanga et al., (2012) Hum. Mutat. 35, 129-136). Further evidence of Msh2 and Msh3's involvement in expansion repeats was reported in a study in which short hairpin RNA (shRNA) knockdown of either MSH2 or MSH3 slowed, and ectopic expression of either MSH2 or MSH3 induced GAA trinucleotide repeat expansion of the Friedreich Ataxia (FRDA) gene in fibroblasts derived from FRDA patients (Halabi et al., (2012) J. Biol. Chem. 287, 29958-29967). In spite of some inconsistent results provided above, there is strong evidence that the MMR pathway plays some role in the expansion of trinucleotide repeats in various disorders. Moreover, they are the first to recognize that the inhibition of the MMR pathway provides for the treatment or prevention of these repeat expansion disorders; however, no therapy is currently available or in development which modulates MMR for purposes of treating or preventing these repeat expansion disorders.

III. dsRNA Agents

[0172] Agents described herein that reduce the level and/or activity of MSH3 in a cell can be, for example, a polynucleotide, e.g., a double stranded nucleotide, or pharmaceutically acceptable salt thereof. These agents reduce the level of an activity related to MSH3, or a related downstream effect, or reduce the level of MSH3 in a cell or subject.

[0173] In some aspects, the agent that reduces the level and/or activity of MSH3 is a polynucleotide. In some aspects, the polynucleotide is an inhibitory RNA molecule, e.g., that acts by way of the RNA interference (RNAi) pathway. An inhibitory RNA molecule can decrease the expression level (e.g., protein level or mRNA level) of MSH3. Inhibitory RNA molecules can be double stranded (dsRNA) molecules. For example, a dsRNA includes a short interfering RNA (siRNA) that targets full-length MSH3. A siRNA is a double-stranded RNA molecule that typically has a length of about 19-25 base pairs. In other aspects, the dsRNA is a short hairpin RNA (shRNA) that targets full-length MSH3. A shRNA is a dsRNA molecule including a hairpin turn that decreases expression of target genes via the RNAi pathway. In some aspects, the dsRNA molecule recruits an RNAse H enzyme. Degradation is caused by an enzymatic, RNA-induced silencing complex (RISC).

[0174] In some aspects, the dsRNA or pharmaceutically acceptable salt thereof decreases the level and/or activity of a positive regulator of function. In other aspects, the dsRNA or pharmaceutically acceptable salt thereof increases the level and/or activity of an inhibitor of a positive regulator of function. In some aspects, the dsRNA increases the level and/or activity of a negative regulator of function.

[0175] In some aspects, the dsRNA, or pharmaceutically acceptable salt thereof, decreases the level and/or activity or function of MSH3. In some aspects, the dsRNA, or pharmaceutically acceptable salt thereof, inhibits expression of MSH3. In other aspects, the dsRNA, or pharmaceutically acceptable salt thereof, increases degradation of MSH3 and/or decreases the stability (i.e., half-life) of MSH3. The dsRNA can be chemically synthesized or transcribed in vitro.

[0176] The dsRNA, or pharmaceutically acceptable salt thereof, includes an antisense strand having a region of complementarity (e.g., a contiguous nucleobase region) which is complementary to at least a part of an mRNA formed in the expression of a MSH3 gene. The region of complementarity can be about 30 nucleotides or less in length (e.g., about 30, 29, 28, 27, 26, 25, 24, 23, 22, 21, 20, 19, or 18 nucleotides or less in length). Upon contact with a cell expressing the MSH3 gene, the dsRNA, or pharmaceutically acceptable salt thereof, can reduce the expression of MSH3 (e.g., a human, a primate, a non-primate, or a bird MSH3) by at least about 10% as assayed by, for example, a PCR or branched DNA (bDNA)-based method, or by a protein-based method, such as by immunofluorescence analysis, using, for example, Western Blotting or flowcytometric techniques.

[0177] A dsRNA, or pharmaceutically acceptable salt thereof, includes two RNA strands that are complementary and hybridize to form a duplex structure under conditions in which the dsRNA can be used. One strand of a dsRNA (the antisense strand) includes a region of complementarity that is substantially complementary, and generally fully complementary, to a target sequence. The target sequence can be derived from the sequence of an mRNA formed during the expression of a MSH3 gene. The other strand (the sense strand) includes a region that is complementary to the antisense strand, such that the two strands hybridize and form a duplex structure when combined under suitable conditions. As described elsewhere herein and as known in the art, the complementary sequences of a dsRNA can be contained as self-complementary regions of a single nucleic acid molecule, as opposed to being on separate oligonucleotides. Generally, the duplex structure is between 15 and 30 linked nucleosides in length, e.g., between 15-29, 15-28, 15-27, 15-26, 15-25, 15-24, 15-23, 15-22, 15-21, 15-20, 15-19, 15-18, 15-17, 18-30, 18-29, 18-28, 18-27, 18-26, 18-25, 18-24, 18-23, 18-22, 18-21, 18-20, 19-30, 19-29, 19-28, 19-27, 19-26, 19-25, 19-24, 19-23, 19-22, 19-21, 19-20, 20-30, 20-29, 20-28, 20-27, 20-26, 20-25, 20-24, 20-23, 20-22, 20-21, 21-30, 21-29, 21-28, 21-27, 21-26, 21-25, 21-24, 21-23, or 21-22 or 15, 16, 17, 18, 19, 20, 21, 22, 23, 24, 25, 26, 27, 28, 29, or 30 linked nucleosides in length. Ranges and lengths intermediate to the above recited ranges and lengths are also contemplated.

[0178] Similarly, the region of complementarity to the target sequence is between 15 and 30 linked nucleosides in length, e.g., between 15-29, 15-28, 15-27, 15-26, 15-25, 15-24, 15-23, 15-22, 15-21, 15-20, 15-19, 15-18, 15-17, 18-30, 18-29, 18-28, 18-27, 18-26, 18-25, 18-24, 18-23, 18-22, 18-21, 18-20, 19-30, 19-29, 19-28, 19-27, 19-26, 19-25, 19-24, 19-23, 19-22, 19-21, 19-20, 20-30, 20-29, 20-28, 20-27, 20-26, 20-25, 20-24, 20-23, 20-22, 20-21, 21-30, 21-29, 21-28, 21-27, 21-26, 21-25, 21-24, 21-23, or 21-22 or 15, 16, 17, 18, 19, 20, 21, 22, 23, 24, 25, 26, 27, 28, 29, or 30 linked nucleosides in length. Ranges and lengths intermediate to the above recited ranges and lengths are also contemplated.

[0179] In some aspects, the dsRNA is between about 15 and about 23 linked nucleosides in length, or between about 25 and about 30 linked nucleosides in length. In general, the dsRNA is long enough to serve as a substrate for the Dicer enzyme. For example, it is well known in the art that dsRNAs longer than about 21-23 linked nucleosides can serve as substrates for Dicer. As the ordinarily skilled person will also recognize, the region of an RNA targeted for cleavage will most often be part of a larger RNA molecule, often an mRNA molecule. Where relevant, a “part” of an mRNA target is a contiguous sequence of an mRNA target of sufficient length to allow it to be a substrate for RNAi-directed cleavage (i.e., cleavage through a RISC pathway).

[0180] One of skill in the art will also recognize that the duplex region is a primary functional portion of a dsRNA. Thus, in one aspect, to the extent that it becomes processed to a functional duplex, of e.g., 15-30 linked nucleosides, that targets a desired RNA for cleavage, an RNA molecule or complex of RNA molecules having a duplex region greater than 30 linked nucleosides is a dsRNA. Thus, an ordinarily skilled artisan will recognize that in one aspect, a dsRNA is not a naturally occurring dsRNA. In another aspect, a dsRNA agent useful to target MSH3 expression is not generated in the target cell by cleavage of a larger dsRNA.

[0181] A dsRNA, or pharmaceutically acceptable salt thereof, as described herein can further include one or more single-stranded nucleoside overhangs e.g., 1, 2, 3, or 4 linked nucleosides. dsRNAs having at least one nucleoside overhang can have unexpectedly superior inhibitory properties relative to their blunt-ended counterparts. A nucleoside overhang can comprise or consist of a deoxyribonucleoside. A nucleoside overhang can comprise or consist of one or more phosphorothioates bonds. The overhang(s) can be on the sense strand, the antisense strand, or any combination thereof. Furthermore, the nucleoside(s) of an overhang can be present on the 5′-end, 3′-end, or both ends of either an antisense or sense strand of a dsRNA. Various dsRNA overhangs are known in the art and can include, but are not limited to: dTdT, UU, or other nucleotides. The overhangs can include phosphorothioate linkages. The overhangs can be different between the sense and antisense oligonucleotides. In some aspects, the dsRNA sequences described herein can include any of the above mentioned overhangs.

[0182] A dsRNA, or pharmaceutically acceptable salt thereof, can be synthesized by standard methods known in the art as further discussed below, e.g., by use of an automated DNA synthesizer, such as are commercially available from, for example, Biosearch, Applied Biosystems, Inc.

[0183] dsRNA compounds can be prepared using a two-step procedure. For example, the individual strands of the dsRNA can be prepared separately. Then, the component strands can be annealed. The individual strands of the dsRNA can be prepared using solution-phase or solid-phase organic synthesis or both. Organic synthesis offers the advantage that the oligonucleotide strands comprising unnatural or alternative nucleotides can be easily prepared. Double-stranded oligonucleotides can be prepared using solution-phase or solid-phase organic synthesis or both.

[0184] In one aspect, a dsRNA includes at least two nucleobase sequences, a sense sequence and an antisense sequence. In some aspects, the antisense strand comprises a nucleobase sequence of an antisense strand in Table 3, wherein the 5′ nucleotide represented by U can be any nucleotide (e.g., U, A, C, G), and the sense strand comprises a nucleobase sequence complementary to the nucleobase sequence of the antisense strand. In other aspects, the sense strand comprises a nucleobase sequence of a sense strand in Table 3, and the antisense strand comprises a nucleobase sequence complementary to the nucleobase sequence of the sense strand. In some aspects, the antisense strand consists of a nucleobase sequence of an antisense strand in Table 3, wherein the 5′ nucleotide represented by U can be any nucleotide (e.g., U, A, C, G), and the sense strand consists of a nucleobase sequence complementary to the nucleobase sequence of the antisense strand. In other aspects, the sense strand consists of a nucleobase sequence of a sense strand in Table 3, and the antisense strand consists of a nucleobase sequence complementary to the nucleobase sequence of the sense strand.

[0185] In some aspects, the sense strand comprises a nucleobase sequence of a sense strand in any one of Tables 4-10, and the antisense strand comprises a nucleobase sequence complementary to the nucleobase sequence of the sense strand. In some aspects, the sense strand consists of a nucleobase sequence of a sense strand in any one of Tables 4-10, and the antisense strand consists of a nucleobase sequence complementary to the nucleobase sequence of the sense strand. In some aspects, the antisense strand comprises a nucleobase sequence of an antisense strand in Table 11, wherein the 5′ nucleotide represented by U of the antisense oligonucleotide is any nucleotide (e.g., U, A, G, C, T), and the sense strand comprises a nucleobase sequence complementary to the nucleobase sequence of the antisense strand. In other aspects, the antisense strand consists of a nucleobase sequence of an antisense strand in Table 11, wherein the 5′ nucleotide represented by U of the antisense oligonucleotide is any nucleotide (e.g., U, A, G, C, T), and the sense strand consists of a nucleobase sequence complementary to the nucleobase sequence of the antisense strand. In some aspects, the sense strand comprises a nucleobase sequence of a sense strand in Table 11, and the antisense strand comprises a nucleobase sequence complementary to the nucleobase sequence of the sense strand. In other aspects, the sense strand consists of a nucleobase sequence of a sense strand in Table 11, and the antisense strand consists of a nucleobase sequence complementary to the nucleobase sequence of the sense strand.

[0186] In these aspects, one of the two sequences is complementary to the other of the two sequences, with one of the sequences being substantially complementary to a sequence of an mRNA generated in the expression of MLH1. As such, in this aspect, a dsRNA will include two oligonucleotides, where one oligonucleotide is described as the sense strand (passenger strand) in Table 3 or 11, and the second oligonucleotide is described as the corresponding antisense strand (guide strand) of the sense strand in Table 3 or 11, wherein the 5′ nucleotide represented by U of the antisense oligonucleotide is any nucleotide (e.g., U, A, G, C, T). In one aspect, the substantially complementary sequences of the dsRNA are contained on separate oligonucleotides. In another aspect, the substantially complementary sequences of the dsRNA are contained on a single oligonucleotide.

[0187] In one aspect, the antisense or sense strand of the dsRNA includes a region of at least 15 contiguous nucleobases having at least 80% (e.g., at least 85%, at least 90%, at least 95%, or at least 99%) complementary to at least 15 contiguous nucleotides of an MSH3 gene. In some aspects, the region of at least 15 contiguous that is complementary to an MSH3 gene corresponding to reference mRNA NM_002439.4 is one or more of positions 566-589, 678-701, 875-989, 1019-1088, 1370-1393, 1466-1569, 1721-1849, 1879-2038, 2086-2171, 2783-2806, 2847-2922, 3043-3119, 3241-3314, 3330-3353, or 3701-3792 of the MSH3 gene. In some aspects, the region of at least 15 contiguous that is complementary to an MSH3 gene corresponding to reference mRNA NM_002439.4 at one or more of positions 876-989, 1019-1088, 1370-1393, 1889-1938, or 3241-3314 of the MSH3 gene. In some aspects, the region of at least 15 contiguous that is complementary to an MSH3 gene corresponding to reference mRNA NM_002439.4 at one or more of positions 876-989, 1019-1088, 1370-1393, 1466-1569, 1756-1849, 1879-2038, 2086-2171, 2783-2806, 2847-2922, 3043-3119, 3241-3314, 3330-3353, or 3701-3792 of the MSH3 gene. In some aspects, the region of at least 15 contiguous that is complementary to an MSH3 gene corresponding to reference mRNA NM_002439.4 at one or more of positions 678-701, 875-989, 1019-1088, 1370-1393, 1466-1569, 1721-1849, 1879-2038, 2086-2171, 2783-2806, 2847-2922, 3043-3119, 3241-3314, 3330-3353, or 3701-3792 of the MSH3 gene. In some aspects, the region of at least 15 contiguous that is complementary to an MSH3 gene corresponding to reference mRNA NM_002439.4 at positions 879-921 of the MSH3 gene. In some aspects, the region the sense or antisense strand is complementary to is at least 15 contiguous nucleotides of an MSH3 gene corresponding to a sequence of reference mRNA NM_002439.4 at one or more of positions 875-989, 1019-1088, 1370-1393, 1466-1569, 1721-1849, 1879-1970, 2783-2806, 2847-2922, 3043-3119, 3241-3314, 3330-3353, or 3703-3792 of the MSH3 gene. In some aspects, the region of at least 15 contiguous that is complementary to an MSH3 gene corresponding to reference mRNA NM_002439.4 at one or more of positions 566-589, 678-701, 875-989, 1019-1088, 1370-1393, 1466-1569, 1721-1849, 1879-2038, 2086-2171, 2783-2806, 2847-2922, 3043-3119, 3241-3314, 3330-3353, or 3701-3792 of the MSH3 gene.

[0188] In some aspects, a dsRNA having a sense strand or an antisense strand comprises the nucleobase sequence of any one of SEQ ID NOs: 6-2873, wherein the 5′ nucleotide represented by U of the antisense oligonucleotide is any nucleotide (e.g., U, A, G, C, T). In some aspects, the sense strand comprises a nucleobase sequence of any one of SEQ ID NOs: 140, 156, 234, 240, 246, 380, 382, 386, 388, 396, 406, 418, 464, 478, 520, 540, 564, 568, 750, 822, 830, 844, 868, 870, 874, 904, 1042, 1060, 1062, 1064, 1068, 1090, 1096, 1098, 1114, 1116, 1166, 1168, 1170, 1182, 1192, 1212, 1214, 1216, 1222, 1244, 1258, 1292, 1358, 1360, 1374, 1378, 1380, 1400, 1866, 1868, 1870, 1882, 1892, 1926, 1946, 1964, 1970, 2084, 2088, 2090, 2094, 2124, 2130, 2146, 2264, 2290, 2308, 2318, 2324, 2606, 2608, 2610, 2632, 2652, 2678, or 2690. In some aspects, the sense strand comprises a nucleobase sequence of any one of SEQ ID NOs: 380, 382, 386, 388, 396, 406, 418, 464, 478, 520, 540, 564, 568, 750, 1166, 1168, 1170, 1182, 1192, 1212, 1214, 1216, 1222, 2264, 2290, 2308, or 2318. In some aspects, the sense strand comprises a nucleobase sequence of any one of SEQ ID NOs: 380, 382, 386, 388, 396, 406, 418, 464, 478, 520, 540, 564, 568, 750, 822, 830, 844, 868, 870, 874, 904, 1060, 1062, 1064, 1068, 1090, 1096, 1098, 1114, 1116, 1166, 1168, 1170, 1182, 1192, 1212, 1214, 1216, 1222, 1244, 1258, 1292, 1358, 1360, 1374, 1378, 1380, 1400, 1866, 1868, 1870, 1882, 1892, 1926, 1946, 1964, 1970, 2084, 2088, 2090, 2094, 2124, 2130, 2146, 2264, 2290, 2308, 2318, 2324, 2606, 2608, 2610, 2632, 2652, 2678, or 2690. In some aspects, the sense strand comprises a nucleobase sequence of any one of SEQ ID NOs: 234, 240, 246, 380, 382, 386, 388, 396, 406, 418, 464, 478, 520, 540, 564, 568, 750, 822, 830, 844, 868, 870, 874, 904, 1042, 1060, 1062, 1064, 1068, 1090, 1096, 1098, 1114, 1116, 1166, 1168, 1170, 1182, 1192, 1212, 1214, 1216, 1222, 1244, 1258, 1292, 1358, 1360, 1374, 1378, 1380, 1400, 1866, 1868, 1870, 1882, 1892, 1926, 1946, 1964, 1970, 2084, 2088, 2090, 2094, 2124, 2130, 2146, 2264, 2290, 2308, 2318, 2324, 2606, 2608, 2610, 2632, 2652, 2678, or 2690. In some aspects, the sense strand comprises a nucleobase sequence of any one of SEQ ID NOs: 380, 382, 386, 388, 396, 406, 418, 464, 478, 520, 540, 564, 568, 750, 822, 830, 844, 868, 870, 874, 904, 1042, 1060, 1062, 1064, 1068, 1090, 1096, 1098, 1114, 1116, 1166, 1168, 1170, 1182, 1192, 1212, 1214, 1216, 1222, 1244, 1866, 1868, 1870, 1882, 1892, 1926, 1946, 1964, 1970, 2084, 2088, 2090, 2094, 2124, 2130, 2146, 2264, 2290, 2308, 2318, 2324, 2606, 2608, 2610, 2632, 2652, 2678, or 2690. In some aspects, the sense strand comprises a nucleobase sequence of any one of SEQ ID NOs: 140, 156, 234, 240, 246, 380, 382, 386, 388, 396, 406, 418, 464, 478, 520, 540, 564, 568, 750, 822, 830, 844, 868, 870, 874, 904, 1042, 1060, 1062, 1064, 1068, 1090, 1096, 1098, 1114, 1116, 1166, 1168, 1170, 1182, 1192, 1212, 1214, 1216, 1222, 1244, 1258, 1292, 1358, 1360, 1374, 1378, 1380, 1400, 1866, 1868, 1870, 1882, 1892, 1926, 1946, 1964, 1970, 2084, 2088, 2090, 2094, 2124, 2130, 2146, 2264, 2290, 2308, 2318, 2324, 2606, 2608, 2610, 2632, 2652, 2678, or 2690.

[0189] In some aspects, the antisense strand comprises a nucleobase sequence of any one of SEQ ID NOs: 141, 157, 235, 241, 247, 381, 383, 387, 389, 397, 407, 419, 465, 479, 521, 541, 565, 569, 751, 823, 831, 845, 869, 871, 875, 905, 1043, 1061, 1063, 1065, 1069, 1091, 1097, 1099, 1115, 1117, 1167, 1169, 1171, 1183, 1193, 1213, 1215, 1217, 1223, 1245, 1259, 1293, 1359, 1361, 1375, 1379, 1381, 1401, 1867, 1869, 1871, 1883, 1893, 1927, 1947, 1965, 1971, 2085, 2089, 2091, 2095, 2125, 2131, 2147, 2265, 2291, 2309, 2319, 2325, 2607, 2609, 2611, 2633, 2653, 2679, or 2691, wherein the 5′ nucleotide represented by U can be any nucleotide (e.g., U, A, C, G). In some aspects, the antisense strand comprises a nucleobase sequence of any one of SEQ ID NOs: 381, 383, 387, 389, 397, 407, 419, 465, 479, 521, 541, 565, 569, 751, 1167, 1169, 1171, 1183, 1193, 1213, 1215, 1217, 1223, 2265, 2291, 2309, or 2319, wherein the 5′ nucleotide represented by U can be any nucleotide (e.g., U, A, C, G). In some aspects, the antisense strand comprises a nucleobase sequence of any one of SEQ ID NOs: 381, 383, 387, 389, 397, 407, 419, 465, 479, 521, 541, 565, 569, 751, 823, 831, 845, 869, 871, 875, 905, 1061, 1063, 1065, 1069, 1091, 1097, 1099, 1115, 1117, 1167, 1169, 1171, 1183, 1193, 1213, 1215, 1217, 1223, 1245, 1259, 1293, 1359, 1361, 1375, 1379, 1381, 1401, 1867, 1869, 1871, 1883, 1893, 1927, 1947, 1965, 1971, 2085, 2089, 2091, 2095, 2125, 2131, 2147, 2265, 2291, 2309, 2319, 2325, 2607, 2609, 2611, 2633, 2653, 2679, or 2691, wherein the 5′ nucleotide represented by U can be any nucleotide (e.g., U, A, C, G). In some aspects, the antisense strand comprises a nucleobase sequence of any one of SEQ ID NOs: 235, 241, 247, 381, 383, 387, 389, 397, 407, 419, 465, 479, 521, 541, 565, 569, 751, 823, 831, 845, 869, 871, 875, 905, 1043, 1061, 1063, 1065, 1069, 1091, 1097, 1099, 1115, 1117, 1167, 1169, 1171, 1183, 1193, 1213, 1215, 1217, 1223, 1245, 1259, 1293, 1359, 1361, 1375, 1379, 1381, 1401, 1867, 1869, 1871, 1883, 1893, 1927, 1947, 1965, 1971, 2085, 2089, 2091, 2095, 2125, 2131, 2147, 2265, 2291, 2309, 2319, 2325, 2607, 2609, 2611, 2633, 2653, 2679, or 2691, wherein the 5′ nucleotide represented by U can be any nucleotide (e.g., U, A, C, G). In some aspects, the antisense strand comprises a nucleobase sequence of any one of SEQ ID NOs: 381, 383, 387, 389, 397, 407, 419, 465, 479, 521, 541, 565, 569, 751, 823, 831, 845, 869, 871, 875, 905, 1043, 1061, 1063, 1065, 1069, 1091, 1097, 1099, 1115, 1117, 1167, 1169, 1171, 1183, 1193, 1213, 1215, 1217, 1223, 1245, 1867, 1869, 1871, 1883, 1893, 1927, 1947, 1965, 1971, 2085, 2089, 2091, 2095, 2125, 2131, 2147, 2265, 2291, 2309, 2319, 2325, 2607, 2609, 2611, 2633, 2653, 2679, or 2691, wherein the 5′ nucleotide represented by U can be any nucleotide (e.g., U, A, C, G). In some aspects, the antisense strand comprises a nucleobase sequence of any one of SEQ ID NOs: 141, 157, 235, 241, 247, 381, 383, 387, 389, 397, 407, 419, 465, 479, 521, 541, 565, 569, 751, 823, 831, 845, 869, 871, 875, 905, 1043, 1061, 1063, 1065, 1069, 1091, 1097, 1099, 1115, 1117, 1167, 1169, 1171, 1183, 1193, 1213, 1215, 1217, 1223, 1245, 1259, 1293, 1359, 1361, 1375, 1379, 1381, 1401, 1867, 1869, 1871, 1883, 1893, 1927, 1947, 1965, 1971, 2085, 2089, 2091, 2095, 2125, 2131, 2147, 2265, 2291, 2309, 2319, 2325, 2607, 2609, 2611, 2633, 2653, 2679, or 2691, wherein the 5′ nucleotide represented by U can be any nucleotide (e.g., U, A, C, G).

[0190] In some aspects, a dsRNA having a sense strand or an antisense strand consists of the nucleobase sequence of any one of SEQ ID NOs: 6-2873, wherein the 5′ nucleotide represented by U of the antisense oligonucleotide is any nucleotide (e.g., U, A, G, C, T).

[0191] In some aspects, the sense strand consists of a nucleobase sequence of any one of SEQ ID NOs: 140, 156, 234, 240, 246, 380, 382, 386, 388, 396, 406, 418, 464, 478, 520, 540, 564, 568, 750, 822, 830, 844, 868, 870, 874, 904, 1042, 1060, 1062, 1064, 1068, 1090, 1096, 1098, 1114, 1116, 1166, 1168, 1170, 1182, 1192, 1212, 1214, 1216, 1222, 1244, 1258, 1292, 1358, 1360, 1374, 1378, 1380, 1400, 1866, 1868, 1870, 1882, 1892, 1926, 1946, 1964, 1970, 2084, 2088, 2090, 2094, 2124, 2130, 2146, 2264, 2290, 2308, 2318, 2324, 2606, 2608, 2610, 2632, 2652, 2678, or 2690. In some aspects, the sense strand consists of a nucleobase sequence of any one of SEQ ID NOs: 380, 382, 386, 388, 396, 406, 418, 464, 478, 520, 540, 564, 568, 750, 1166, 1168, 1170, 1182, 1192, 1212, 1214, 1216, 1222, 2264, 2290, 2308, or 2318. In some aspects, the sense strand consists of a nucleobase sequence of any one of SEQ ID NOs: 380, 382, 386, 388, 396, 406, 418, 464, 478, 520, 540, 564, 568, 750, 822, 830, 844, 868, 870, 874, 904, 1060, 1062, 1064, 1068, 1090, 1096, 1098, 1114, 1116, 1166, 1168, 1170, 1182, 1192, 1212, 1214, 1216, 1222, 1244, 1258, 1292, 1358, 1360, 1374, 1378, 1380, 1400, 1866, 1868, 1870, 1882, 1892, 1926, 1946, 1964, 1970, 2084, 2088, 2090, 2094, 2124, 2130, 2146, 2264, 2290, 2308, 2318, 2324, 2606, 2608, 2610, 2632, 2652, 2678, or 2690. In some aspects, the sense strand consists of a nucleobase sequence of any one of SEQ ID NOs: 234, 240, 246, 380, 382, 386, 388, 396, 406, 418, 464, 478, 520, 540, 564, 568, 750, 822, 830, 844, 868, 870, 874, 904, 1042, 1060, 1062, 1064, 1068, 1090, 1096, 1098, 1114, 1116, 1166, 1168, 1170, 1182, 1192, 1212, 1214, 1216, 1222, 1244, 1258, 1292, 1358, 1360, 1374, 1378, 1380, 1400, 1866, 1868, 1870, 1882, 1892, 1926, 1946, 1964, 1970, 2084, 2088, 2090, 2094, 2124, 2130, 2146, 2264, 2290, 2308, 2318, 2324, 2606, 2608, 2610, 2632, 2652, 2678, or 2690. In some aspects, the sense strand consists of a nucleobase sequence of any one of SEQ ID NOs: 380, 382, 386, 388, 396, 406, 418, 464, 478, 520, 540, 564, 568, 750, 822, 830, 844, 868, 870, 874, 904, 1042, 1060, 1062, 1064, 1068, 1090, 1096, 1098, 1114, 1116, 1166, 1168, 1170, 1182, 1192, 1212, 1214, 1216, 1222, 1244, 1866, 1868, 1870, 1882, 1892, 1926, 1946, 1964, 1970, 2084, 2088, 2090, 2094, 2124, 2130, 2146, 2264, 2290, 2308, 2318, 2324, 2606, 2608, 2610, 2632, 2652, 2678, or 2690. In some aspects, the sense strand consists of a nucleobase sequence of any one of SEQ ID NOs: 140, 156, 234, 240, 246, 380, 382, 386, 388, 396, 406, 418, 464, 478, 520, 540, 564, 568, 750, 822, 830, 844, 868, 870, 874, 904, 1042, 1060, 1062, 1064, 1068, 1090, 1096, 1098, 1114, 1116, 1166, 1168, 1170, 1182, 1192, 1212, 1214, 1216, 1222, 1244, 1258, 1292, 1358, 1360, 1374, 1378, 1380, 1400, 1866, 1868, 1870, 1882, 1892, 1926, 1946, 1964, 1970, 2084, 2088, 2090, 2094, 2124, 2130, 2146, 2264, 2290, 2308, 2318, 2324, 2606, 2608, 2610, 2632, 2652, 2678, or 2690. In some aspects, the sense strand consists of a nucleobase sequence of any one of SEQ ID NOs: 141, 157, 235, 241, 247, 381, 383, 387, 389, 397, 407, 419, 465, 479, 521, 541, 565, 569, 751, 823, 831, 845, 869, 871, 875, 905, 1043, 1061, 1063, 1065, 1069, 1091, 1097, 1099, 1115, 1117, 1167, 1169, 1171, 1183, 1193, 1213, 1215, 1217, 1223, 1245, 1259, 1293, 1359, 1361, 1375, 1379, 1381, 1401, 1867, 1869, 1871, 1883, 1893, 1927, 1947, 1965, 1971, 2085, 2089, 2091, 2095, 2125, 2131, 2147, 2265, 2291, 2309, 2319, 2325, 2607, 2609, 2611, 2633, 2653, 2679, or 2691.

[0192] In some aspects, the antisense strand consists of a nucleobase sequence of any one of SEQ ID NOs: 381, 383, 387, 389, 397, 407, 419, 465, 479, 521, 541, 565, 569, 751, 1167, 1169, 1171, 1183, 1193, 1213, 1215, 1217, 1223, 2265, 2291, 2309, or 2319, wherein the 5′ nucleotide represented by U can be any nucleotide (e.g., U, A, C, G). In some aspects, the antisense strand consists of a nucleobase sequence of any one of SEQ ID NOs: 381, 383, 387, 389, 397, 407, 419, 465, 479, 521, 541, 565, 569, 751, 823, 831, 845, 869, 871, 875, 905, 1061, 1063, 1065, 1069, 1091, 1097, 1099, 1115, 1117, 1167, 1169, 1171, 1183, 1193, 1213, 1215, 1217, 1223, 1245, 1259, 1293, 1359, 1361, 1375, 1379, 1381, 1401, 1867, 1869, 1871, 1883, 1893, 1927, 1947, 1965, 1971, 2085, 2089, 2091, 2095, 2125, 2131, 2147, 2265, 2291, 2309, 2319, 2325, 2607, 2609, 2611, 2633, 2653, 2679, or 2691, wherein the 5′ nucleotide represented by U can be any nucleotide (e.g., U, A, C, G). In some aspects, the antisense strand consists of a nucleobase sequence of any one of SEQ ID NOs: 235, 241, 247, 381, 383, 387, 389, 397, 407, 419, 465, 479, 521, 541, 565, 569, 751, 823, 831, 845, 869, 871, 875, 905, 1043, 1061, 1063, 1065, 1069, 1091, 1097, 1099, 1115, 1117, 1167, 1169, 1171, 1183, 1193, 1213, 1215, 1217, 1223, 1245, 1259, 1293, 1359, 1361, 1375, 1379, 1381, 1401, 1867, 1869, 1871, 1883, 1893, 1927, 1947, 1965, 1971, 2085, 2089, 2091, 2095, 2125, 2131, 2147, 2265, 2291, 2309, 2319, 2325, 2607, 2609, 2611, 2633, 2653, 2679, or 2691, wherein the 5′ nucleotide represented by U can be any nucleotide (e.g., U, A, C, G). In some aspects, the antisense strand consists of a nucleobase sequence of any one of SEQ ID NOs: 381, 383, 387, 389, 397, 407, 419, 465, 479, 521, 541, 565, 569, 751, 823, 831, 845, 869, 871, 875, 905, 1043, 1061, 1063, 1065, 1069, 1091, 1097, 1099, 1115, 1117, 1167, 1169, 1171, 1183, 1193, 1213, 1215, 1217, 1223, 1245, 1867, 1869, 1871, 1883, 1893, 1927, 1947, 1965, 1971, 2085, 2089, 2091, 2095, 2125, 2131, 2147, 2265, 2291, 2309, 2319, 2325, 2607, 2609, 2611, 2633, 2653, 2679, or 2691, wherein the 5′ nucleotide represented by U can be any nucleotide (e.g., U, A, C, G). In some aspects, the antisense strand consists of a nucleobase sequence of any one of SEQ ID NOs: 141, 157, 235, 241, 247, 381, 383, 387, 389, 397, 407, 419, 465, 479, 521, 541, 565, 569, 751, 823, 831, 845, 869, 871, 875, 905, 1043, 1061, 1063, 1065, 1069, 1091, 1097, 1099, 1115, 1117, 1167, 1169, 1171, 1183, 1193, 1213, 1215, 1217, 1223, 1245, 1259, 1293, 1359, 1361, 1375, 1379, 1381, 1401, 1867, 1869, 1871, 1883, 1893, 1927, 1947, 1965, 1971, 2085, 2089, 2091, 2095, 2125, 2131, 2147, 2265, 2291, 2309, 2319, 2325, 2607, 2609, 2611, 2633, 2653, 2679, or 2691, wherein the 5′ nucleotide represented by U can be any nucleotide (e.g., U, A, C, G).

[0193] In some aspects, the dsRNA exhibits at least 50% mRNA inhibition at a 0.5 nM dsRNA concentration when determined using a cell assay when compared with a control cell. In some aspects, the dsRNA exhibits at least 40% mRNA inhibition at a 0.5 nM dsRNA concentration when determined using a cell assay when compared with a control cell. In some aspects, the dsRNA exhibits at least 30% mRNA inhibition at a 0.5 nM dsRNA concentration when determined using a cell assay when compared with a control cell. In some aspects, the dsRNA exhibits at least 70% mRNA inhibition at a 10 nM dsRNA concentration when determined using a cell assay when compared with a control cell. In some aspects, the dsRNA exhibits at least 60% mRNA inhibition at a 10 nM dsRNA concentration when determined using a cell assay when compared with a control cell. In some aspects, the dsRNA exhibits at least 50% mRNA inhibition at a 10 nM dsRNA concentration when determined using a cell assay when compared with a control cell.

[0194] In some aspects, the antisense strand is complementary to at least 17 contiguous nucleotides of an MSH3 gene. In some aspects, the antisense strand is complementary to at least 19 contiguous nucleotides of an MSH3 gene. In some aspects, the antisense strand is complementary to 19 contiguous nucleotides of an MSH3 gene. In some aspects, the sense strand is complementary to at least 17 contiguous nucleotides of an MSH3 gene. In some aspects, the sense strand is complementary to at least 19 contiguous nucleotides of an MSH3 gene. In some aspects, the sense strand is complementary to 19 contiguous nucleotides of an MSH3 gene.

[0195] Multiple dsRNAs can be joined together by a linker. The linker can be cleavable or non-cleavable. The dsRNAs can be the same or different.

[0196] In some aspects, a dsRNA has a sense strand or an antisense strand having a nucleobase sequence with at least 50% (e.g., at least 50%, at least 60%, at least 70%, at least 80%, at least 85%, at least 90%, at least 95%, at least 96%, at least 97%, at least 98%, at least 99%, or 100%) sequence identity to the nucleobase sequence any one of SEQ ID NOs: 6-2873, wherein the 5′ nucleotide represented by U can be any nucleotide (e.g., U, A, C, G). In some aspects, a dsRNA has a sense strand or an antisense strand having a nucleobase sequence with at least 85% sequence identity to the nucleobase sequence of any one of SEQ ID NOs: 6-2873, wherein the 5′ nucleotide represented by U can be any nucleotide (e.g., U, A, C, G).

[0197] It will be understood that, although the sequences in SEQ ID NOs: 6-2873 are described as unmodified and/or un-conjugated sequences, the RNA of the dsRNA can comprise any one of the sequences set forth in any one of SEQ ID NOs: 6-2873 that is an alternative nucleoside and/or conjugated as described in detail below.

[0198] The skilled person is well aware that dsRNAs having a duplex structure of between about 20 and 23 linked nucleosides, e.g., 21 linked nucleosides, have been hailed as particularly effective in inducing RNA interference (Elbashir et al., (2001) EMBO J., 20:6877-6888). However, others have found that shorter or longer RNA duplex structures can be effective (Chu and Rana (2007) RNA 14:1714-1719; Kim et al. (2005) Nat Biotech 23:222-226). In the aspects described above, by virtue of the nature of the oligonucleotide sequences provided herein, dsRNAs described herein can include at least one strand of a length of minimally 21 linked nucleosides. It can be reasonably expected that shorter duplexes minus only a few linked nucleosides on one or both ends can be similarly effective as compared to the dsRNAs described above. Hence, dsRNAs having a sequence of at least 8, 9, 10, 11, 12, 13, 14, 15, 16, 17, 18, 19, 20, or more contiguous linked nucleosides derived from one of the sequences provided herein, and differing in their ability to reduce the expression of MSH3 by not more than about 5, 10, 15, 20, 25, or 30% reduction from a dsRNA comprising the full sequence, are contemplated.

[0199] In addition, the RNAs described herein identify a site(s) in a MSH3 transcript that is susceptible to RISC-mediated cleavage. As used herein, a dsRNA is said to target within a particular site of an RNA transcript if the dsRNA promotes cleavage of the transcript anywhere within that particular site. Such a dsRNA will generally include at least about 15 contiguous linked nucleosides from one of the sequences provided herein coupled to additional linked nucleoside sequences taken from the region contiguous to the selected sequence in a MSH3 gene.

[0200] Inhibitory dsRNAs can be designed by methods well known in the art. While a target sequence is generally about 15-30 linked nucleosides in length, there is wide variation in the suitability of particular sequences in this range for directing cleavage of any given target RNA.

[0201] dsRNAs (e.g., siRNA and shRNA molecules) with homology sufficient to provide sequence specificity required to uniquely degrade any RNA can be designed using programs known in the art.

[0202] Systematic testing of several designed species for optimization of the inhibitory dsRNA sequence can be undertaken in accordance with the teachings provided herein. Considerations when designing interfering oligonucleotides include, but are not limited to, biophysical, thermodynamic, and structural considerations, base preferences at specific positions in the sense strand, and homology. The making and use of inhibitory therapeutic agents based on non-coding RNA such as siRNAs and shRNAs are also known in the art, for example, as described in Sioud, RNA Therapeutics: Function, Design, and Delivery (Methods in Molecular Biology). Humana Press 2010.

[0203] Various software packages and the guidelines set out herein provide guidance for the identification of optimal target sequences for any given gene target, but an empirical approach can be taken in which a “window” or “mask” of a given size (as a non-limiting example, 21 nucleotides) is literally or figuratively (including, e.g., in silico) placed on the target RNA sequence to identify sequences in the size range that can serve as target sequences. By moving the sequence “window” progressively one nucleotide upstream or downstream of an initial target sequence location, the next potential target sequence can be identified, until the complete set of possible sequences is identified for any given target size selected. This process, coupled with systematic synthesis and testing of the identified sequences (using assays as described herein or as known in the art) to identify those sequences that perform optimally can identify those RNA sequences that, when targeted with a dsRNA agent, mediate the best reduction of target gene expression. Thus, while the sequences identified herein represent effective target sequences, it is contemplated that further optimization of reduction efficiency can be achieved by progressively “walking the window” one nucleotide upstream or downstream of the given sequences to identify sequences with equal or better reduction characteristics.

[0204] Further, it is contemplated that for any sequence identified herein, further optimization could be achieved by systematically either adding or removing linked nucleosides to generate longer or shorter sequences and testing those sequences generated by walking a window of the longer or shorter size up or down the target RNA from that point. Again, coupling this approach to generating new candidate targets with testing for effectiveness of dsRNAs based on those target sequences in an inhibition assay as known in the art and/or as described herein can lead to further improvements in the efficiency of inhibition.

[0205] Further still, such optimized sequences can be adjusted by, e.g., addition or changes in overhang, the introduction of alternative nucleosides, alternative sugar moieties, and/or alternative internucleosidic linkages as described herein or as known in the art, including alternative nucleosides, alternative sugar moieties, and/or alternative internucleosidic linkages as known in the art and/or discussed herein to further optimize the molecule (e.g., increasing serum stability or circulating half-life, increasing thermal stability, enhancing transmembrane delivery, targeting to a particular location or cell type, increasing interaction with silencing pathway enzymes, increasing release from endosomes) as an expression inhibitor. A dsRNA agent as described herein can contain one or more mismatches to the target sequence. In one aspect, a dsRNA as described herein contains no more than 3 mismatches. In one aspect, if the antisense strand of the dsRNA contains mismatches to a target sequence, the area of mismatch is not located in the center of the region of complementarity. If the antisense strand of the dsRNA contains mismatches to the target sequence, the mismatch can be restricted to be within the last 5 nucleotides from either the 5′- or 3′-end of the region of complementarity. For example, for a 23-nucleotide dsRNA, the strand which is complementary to a region of a MSH3 gene, generally does not contain any mismatch within the central 13 nucleotides. The methods described herein or methods known in the art can be used to determine whether a dsRNA containing a mismatch to a target sequence is effective in reducing the expression of a MSH3 gene. Consideration of the efficacy of dsRNAs with mismatches in reducing expression of MSH3 is important, especially if the particular region of complementarity in MSH3 is known to have polymorphic sequence variation within the population.

[0206] Construction of vectors for expression of polynucleotides for use in the methods described herein can be accomplished using conventional techniques which do not require detailed explanation to one of ordinary skill in the art. For generation of efficient expression vectors, it is necessary to have regulatory sequences that control the expression of the polynucleotide. These regulatory sequences include promoter and enhancer sequences and are influenced by specific cellular factors that interact with these sequences, and are well known in the art.

A. Alternative dsRNAs

[0207] In one aspect, one or more of the linked nucleosides or internucleosidic linkages of the dsRNA is naturally occurring, and does not comprise, e.g., chemical modifications and/or conjugations known in the art and described herein. In another aspect, one or more of the linked nucleosides or internucleosidic linkages of a dsRNA is chemically modified to enhance stability or other beneficial characteristics. Without being bound by theory, it is believed that certain modifications can increase nuclease resistance and/or serum stability, or decrease immunogenicity. For example, dsRNAs can contain nucleotides found to occur naturally in DNA or RNA (e.g., adenine, thymidine, guanosine, cytidine, uridine, or inosine) or can contain alternative nucleosides or internucleosidic linkages which have one or more chemical modifications to one or more components of the nucleotide (e.g., the nucleobase, sugar, or phospho-linker moiety). dsRNAs can be linked to one another through naturally occurring phosphodiester bonds, or can contain alternative linkages (e.g., covalently linked through phosphorothioate (e.g., Sp phosphorothioate or Rp phosphorothioate), 3′-methylenephosphonate, 5′-methylenephosphonate, 3′-phosphoamidate, 2′-5′ phosphodiester, guanidinium, S-methylthiourea, 2′-alkoxy, alkyl phosphate, and/or peptide bonds).

[0208] In some aspects, substantially all of the nucleosides or internucleosidic linkages of a dsRNA are alternative nucleosides. In other aspects, all of the nucleosides or internucleosidic linkages of dsRNA are alternative nucleosides. dsRNA in which “substantially all of the nucleosides are alternative nucleosides” are largely but not wholly modified and can include not more than five, four, three, two, or one naturally-occurring nucleosides. In still other aspects, dsRNAs can include not more than five, four, three, two, or one alternative nucleosides.

[0209] The nucleic acids can be synthesized and/or modified by methods well established in the art, such as those described in “Current protocols in nucleic acid chemistry,” Beaucage, S. L. et al. (Edrs.), John Wiley & Sons, Inc., New York, N.Y., USA, which is hereby incorporated herein by reference. Alternative nucleotides and nucleosides include those with modifications including, for example, end modifications, e.g., 5′-end modifications (phosphorylation, conjugation, inverted linkages) or 3′-end modifications (conjugation, DNA nucleotides, inverted linkages, etc.); base modifications, e.g., replacement with stabilizing bases, destabilizing bases, or bases that base pair with an expanded repertoire of partners, removal of bases (abasic nucleotides), or conjugated bases; sugar modifications (e.g., at the 2′-position or 4′-position) or replacement of the sugar; and/or backbone modifications, including modification or replacement of the phosphodiester linkages. The nucleobase can be an isonucleoside in which the nucleobase is moved from the C1 position of the sugar moiety to a different position (e.g. C2, C3, C4, or C5). Specific examples of dsRNA compounds useful in the aspects described herein include, but are not limited to alternative nucleosides containing modified backbones or no natural internucleoside linkages. Nucleotides and nucleosides having modified backbones include, among others, those that do not have a phosphorus atom in the backbone. For the purposes of this specification, and as sometimes referenced in the art, alternative RNAs that do not have a phosphorus atom in their internucleoside backbone can be considered to be oligonucleosides. In some aspects, a dsRNA will have a phosphorus atom in its internucleoside backbone.

[0210] Alternative internucleoside linkages include, for example, phosphorothioates, chiral phosphorothioates, phosphorodithioates, phosphotriesters, aminoalkylphosphotriesters, methyl and other alkyl phosphonates including 3′-alkylene phosphonates and chiral phosphonates, phosphinates, phosphoramidates including 3′-amino phosphoramidate and aminoalkylphosphoramidates, thionophosphoramidates, thionoalkylphosphonates, thionoalkylphosphotriesters, and boronophosphates having normal 3′-5′ linkages, 2′-5′-linked analogs of these, and those having inverted polarity wherein the adjacent pairs of nucleoside units are linked 3′-5′ to 5′-3′ or 2′-5′ to 5′-2′. Various salts, mixed salts, and free acid forms are also included.

[0211] Representative U.S. patents that teach the preparation of the above phosphorus-containing linkages include, but are not limited to, U.S. Pat. Nos. 3,687,808; 4,469,863; 4,476,301; 5,023,243; 5,177,195; 5,188,897; 5,264,423; 5,276,019; 5,278,302; 5,286,717; 5,321,131; 5,399,676; 5,405,939; 5,453,496; 5,455,233; 5,466,677; 5,476,925; 5,519,126; 5,536,821; 5,541,316; 5,550,111; 5,563,253; 5,571,799; 5,587,361; 5,625,050; 6,028,188; 6,124,445; 6,160,109; 6,169,170; 6,172,209; 6,239,265; 6,277,603; 6,326,199; 6,346,614; 6,444,423; 6,531,590; 6,534,639; 6,608,035; 6,683,167; 6,858,715; 6,867,294; 6,878,805; 7,015,315; 7,041,816; 7,273,933; 7,321,029; and U.S. Pat. RE39464, the entire contents of each of which are hereby incorporated herein by reference.

[0212] Alternative internucleoside linkages that do not include a phosphorus atom therein have backbones that are formed by short chain alkyl or cycloalkyl internucleoside linkages, mixed heteroatoms and alkyl or cycloalkyl internucleoside linkages, or one or more short chain heteroatomic or heterocyclic internucleoside linkages. These include those having morpholino linkages (formed in part from the sugar portion of a nucleoside); siloxane backbones; sulfide, sulfoxide and sulfone backbones; formacetyl and thioformacetyl backbones; methylene formacetyl and thioformacetyl backbones; alkene containing backbones; sulfamate backbones; methyleneimino and methylenehydrazino backbones; sulfonate and sulfonamide backbones; amide backbones; and others having mixed N, O, S, and CH₂ component parts.

[0213] Representative U.S. patents that teach the preparation of the above oligonucleosides include, but are not limited to, U.S. Pat. Nos. 5,034,506; 5,166,315; 5,185,444; 5,214,134; 5,216,141; 5,235,033; 564,562; 5,264,564; 5,405,938; 5,434,257; 5,466,677; 5,470,967; 5,489,677; 5,541,307; 5,561,225; 5,596,086; 5,602,240; 5,608,046; 5,610,289; 5,618,704; 5,623,070; 5,663,312; 5,633,360; 5,677,437; and, 5,677,439, the entire contents of each of which are hereby incorporated herein by reference.

[0214] In other aspects, suitable dsRNAs include those in which both the sugar and the internucleoside linkage, i.e., the backbone, of the nucleotide units are replaced. The base units are maintained for hybridization with an appropriate nucleic acid target compound. One such oligomeric compound, a mimetic that has been shown to have excellent hybridization properties, is referred to as a peptide nucleic acid (PNA). In PNA compounds, the sugar of a nucleoside is replaced with an amide containing backbone, in particular an aminoethylglycine backbone. The nucleobases are retained and are bound directly or indirectly to aza nitrogen atoms of the amide portion of the backbone. Representative U.S. patents that teach the preparation of PNA compounds include, but are not limited to, U.S. Pat. Nos. 5,539,082; 5,714,331; and 5,719,262, the entire contents of each of which are hereby incorporated herein by reference. Additional PNA compounds suitable for use in the dsRNAs are described in, for example, in Nielsen et al., Science, 1991, 254, 1497-1500.

[0215] Some aspects include dsRNAs with phosphorothioate backbones and oligonucleotides with heteroatom backbones, and in particular —CH₂—NH—CH₂—, —CH₂—N(CH₃)—O—CH₂-[known as a methylene (methylimino) or MMI backbone], —CH₂—O—N(CH₃)—CH₂—, —CH₂—N(CH₃)—N(CH₃)—CH₂— and —N(CH₃)—CH₂—CH₂-[wherein the native phosphodiester backbone is represented as —O—P—O—CH₂—] of the above-referenced U.S. Pat. No. 5,489,677, and the amide backbones of the above-referenced U.S. Pat. No. 5,602,240. In some aspects, the dsRNAs featured herein have morpholino backbone structures of the above-referenced U.S. Pat. No. 5,034,506. In other aspects, the dsRNAs described herein include phosphorodiamidate morpholino oligomers (PMO), in which the deoxyribose moiety is replaced by a morpholine ring, and the charged phosphodiester inter-subunit linkage is replaced by an uncharged phophorodiamidate linkage, as described in Summerton, et al., Antisense Nucleic Acid Drug Dev. 1997, 7:63-70.

[0216] Alternative nucleosides and nucleotides can contain one or more substituted sugar moieties. The dsRNAs, e.g., siRNAs and shRNAs, featured herein can include one of the following at the 2′-position: OH; F; O—, S—, or N-alkyl; O—, S—, or N-alkenyl; O—, S- or N-alkynyl; or O-alkyl-O-alkyl, wherein the alkyl, alkenyl and alkynyl can be substituted or unsubstituted C₁ to C₁₀ alkyl or C₂ to C₁₀ alkenyl and alkynyl. Exemplary suitable modifications include —O[(CH₂)ₙO]ₘCH₃, —O(CH₂)ₙOCH₃, —O(CH₂)ₙ—NH₂, —O(CH₂)ₙCH₃, —O(CH₂)ₙ—ONH₂, and —O(CH₂)ₙ—ON[(CH₂)ₙCH₃]₂, where n and m are from 1 to about 10. In other aspects, dsRNAs include one of the following at the 2′ position: C₁ to C₁₀ lower alkyl, substituted lower alkyl, alkaryl, aralkyl, O-alkaryl or O-aralkyl, SH, SCH₃, OCN, Cl, Br, CN, CF₃, OCF₃, SOCH₃, SO₂CH₃, ONO₂, N₃, NH₂, heterocycloalkyl, heterocycloalkaryl, aminoalkylamino, polyalkylamino, substituted silyl, an RNA cleaving group, a reporter group, an intercalator, a group for improving the pharmacokinetic properties of a dsRNA, or a group for improving the pharmacodynamic properties of a dsRNA, and other substituents having similar properties. In some aspects, the modification includes a 2′-methoxyethoxy (2′-O—CH₂CH₂OCH₃, also known as 2′-O-(2-methoxyethyl) or 2′-MOE) (Martin et al., Helv. Chin. Acta, 1995, 78:486-504) i.e., an alkoxy-alkoxy group. MOE nucleosides confer several beneficial properties to dsRNAs including, but not limited to, increased nuclease resistance, improved pharmacokinetics properties, reduced non-specific protein binding, reduced toxicity, reduced immunostimulatory properties, and enhanced target affinity as compared to unmodified dsRNAs.

[0217] Another exemplary alternative contains 2′-dimethylaminooxyethoxy, i.e., a —O(CH₂)₂ON(CH₃)₂ group, also known as 2′-DMAOE, as described in examples herein below, and 2′-dimethylaminoethoxyethoxy (also known in the art as 2′-O-dimethylaminoethoxyethyl or 2′-DMAEOE), i.e., 2′-O—(CH₂)₂—O—(CH₂)₂—N(CH₃)₂. Further exemplary alternatives include: 5′-Me-2′-F nucleotides, 5′-Me-2′-OMe nucleotides, 5′-Me-2′-deoxynucleotides, (both R and S isomers in these three families); 2′-alkoxyalkyl; and 2′-NMA (N-methylacetamide).

[0218] Other alternatives include 2′-methoxy (2′-OCH₃), 2′-aminopropoxy (2′-OCH₂CH₂CH₂NH₂) and 2′-fluoro (2′-F). Similar modifications can be made at other positions on the nucleosides and nucleotides of a dsRNA, particularly the 3′ position of the sugar on the 3′ terminal nucleotide or in 2′-5′ linked dsRNAs and the 5′ position of 5′ terminal nucleotide. dsRNAs can have sugar mimetics such as cyclobutyl moieties in place of the pentofuranosyl sugar. Representative U.S. patents that teach the preparation of such modified sugar structures include, but are not limited to, U.S. Pat. Nos. 4,981,957; 5,118,800; 5,319,080; 5,359,044; 5,393,878; 5,446,137; 5,466,786; 5,514,785; 5,519,134; 5,567,811; 5,576,427; 5,591,722; 5,597,909; 5,610,300; 5,627,053; 5,639,873; 5,646,265; 5,658,873; 5,670,633; and 5,700,920, certain of which are commonly owned with the instant application. The entire contents of each of the foregoing are hereby incorporated herein by reference.

[0219] A dsRNA can include nucleobase (often referred to in the art simply as “base”) alternatives (e.g., modifications or substitutions). Unmodified or natural nucleobases include the purine bases adenine (A) and guanine (G), and the pyrimidine bases thymine (T), cytosine (C) and uracil (U). Alternative nucleobases include other synthetic and natural nucleobases such as 5-methylcytidine, 5-hydroxymethylcytidine, 5-formylcytidine, 5-carboxycytidine, pyrrolocytidine, dideoxycytidine, uridine, 5-methoxyuridine, 5-hydroxydeoxyuridine, dihydrouridine, 4-thiourdine, pseudouridine, 1-methyl-pseudouridine, deoxyuridine, 5-hydroxybutynl-2′-deoxyuridine, xanthine, hypoxanthine, 7-deaza-xanthine, thienoguanine, 8-aza-7-deazaguanosine, 7-methylguanosine, 7-deazaguanosine, 6-aminomethyl-7-deazaguanosine, 8-aminoguanine, 2,2,7-trimethylguanosine, 8-methyladenine, 8-azidoadenine, 7-methyladenine, 7-deazaadenine, 3-deazaadenine, 2,6-diaminopurine, 2-aminopurine, 7-deaza-8-aza-adenine, 8-amino-adenine, thymine, dideoxythymine, 5-nitroindole, 2-aminoadenine, 6-methyl and other alkyl derivatives of adenine and guanine, 2-propyl and other alkyl derivatives of adenine and guanine, 2-thiouridine, 2-thiothymine and 2-thiocytosine, 5-halouracil and cytosine, 5-propynyl uridine and cytidine, 6-azo uridine, cytidine and thymine, 4-thiouridine, 8-halo, 8-amino, 8-thiol, 8-thioalkyl, 8-hydroxyl anal other 8-substituted adenines and guanines, 5-halo, particularly 5-bromo, 5-trifluoromethyl and other 5-substituted uridines and cytidines, 8-azaguanine and 8-azaadenine, and 3-deazaguanine. Further nucleobases include those disclosed in U.S. Pat. No. 3,687,808, those disclosed in Modified Nucleosides in Biochemistry, Biotechnology and Medicine, Herdewijn, P. ed. Wiley-VCH, 2008; those disclosed in The Concise Encyclopedia Of Polymer Science And Engineering, pages 858-859, Kroschwitz, J. L, ed. John Wiley & Sons, 1990, these disclosed by Englisch et al., (1991) Angewandte Chemie, International Edition, 30:613, and those disclosed by Sanghvi, Y S., Chapter 15, Antisense Research and Applications, pages 289-302, Crooke, S. T. and Lebleu, B., Ed., CRC Press, 1993. Certain of these nucleobases are particularly useful for increasing the binding affinity of the oligomeric compounds described herein. These include 5-substituted pyrimidines, 6-azapyrimidines, and N-2, N-6 and 0-6 substituted purines, including 2-aminopropyladenine, 5-propynyluracil, and 5-propynylcytosine. 5-methylcytosine substitutions have been shown to increase nucleic acid duplex stability by 0.6-1.2° C. (Sanghvi, Y. S., Crooke, S. T. and Lebleu, B., Eds., Antisense Research and Applications, CRC Press, Boca Raton, 1993, pp. 276-278) and are exemplary base substitutions, even more particularly when combined with 2′-O-methoxyethyl sugar modifications.

[0220] Representative U.S. patents that teach the preparation of certain of the above noted alternative nucleobases as well as other alternative nucleobases include, but are not limited to, the above noted U.S. Pat. Nos. 3,687,808, 4,845,205; 5,130,30; 5,134,066; 5,175,273; 5,367,066; 5,432,272; 5,457,187; 5,459,255; 5,484,908; 5,502,177; 5,525,711; 5,552,540; 5,587,469; 5,594,121, 5,596,091; 5,614,617; 5,681,941; 5,750,692; 6,015,886; 6,147,200; 6,166,197; 6,222,025; 6,235,887; 6,380,368; 6,528,640; 6,639,062; 6,617,438; 7,045,610; 7,427,672; and 7,495,088, the entire contents of each of which are hereby incorporated herein by reference.

[0221] In other aspects, the sugar moiety in the nucleotide can be a ribose molecule, optionally having a 2′-O-methyl, 2′-O-MOE, 2′-F, 2′-amino, 2′-O-propyl, 2′-aminopropyl, or 2′-OH modification.

[0222] A dsRNA can include one or more bicyclic sugar moieties. A “bicyclic sugar” is a furanosyl ring modified by the bridging of two atoms. A “bicyclic nucleoside” (“BNA”) is a nucleoside having a sugar moiety comprising a bridge connecting two carbon atoms of the sugar ring, thereby forming a bicyclic ring system. In some aspects, the bridge connects the 4′-carbon and the 2′-carbon of the sugar ring. Thus, in some aspects, a dsRNA can include one or more locked nucleosides. A locked nucleoside is a nucleoside having a modified ribose moiety in which the ribose moiety comprises an extra bridge connecting the 2′ and 4′ carbons. In other words, a locked nucleoside is a nucleoside comprising a bicyclic sugar moiety comprising a 4′-CH₂—O-2′ bridge. This structure effectively “locks” the ribose in the 3′-endo structural conformation. The addition of locked nucleosides to dsRNAs has been shown to increase dsRNA stability in serum, and to reduce off-target effects (Elmen, J. et al., (2005) Nucleic Acids Research 33(1):439-447; Mook, O R. et al., (2007) Mol Canc Ther 6(3):833-843; Grunweller, A. et al., (2003) Nucleic Acids Research 31(12):3185-3193). Examples of bicyclic nucleosides for use in the polynucleotides include without limitation nucleosides comprising a bridge between the 4′ and the 2′ ribosyl ring atoms. In some aspects, the antisense polynucleotide agents include one or more bicyclic nucleosides comprising a 4′ to 2′ bridge. Examples of such 4′ to 2′ bridged bicyclic nucleosides, include but are not limited to 4′-(CH₂)—O-2′ (LNA); 4′-(CH₂)—S-2′; 4′-(CH₂)₂—O-2′ (ENA); 4′-CH(CH₃)—O-2′ (also referred to as “constrained ethyl” or “cEt”) and 4′-CH(CH₂OCH₃)—O-2′ (and analogs thereof; see, e.g., U.S. Pat. No. 7,399,845); 4′-C(CH₃)(CH₃)—O-2′ (and analogs thereof; see e.g., U.S. Pat. No. 8,278,283); 4′-CH₂—N(OCH₃)-2′ (and analogs thereof; see e.g., U.S. Pat. No. 8,278,425); 4′-CH₂—O—N(CH₃)₂-2′ (see, e.g., U.S. Patent Publication No. 2004/0171570); 4′-CH₂—N(R)—O-2′, wherein R is H, C₁-C₁₂ alkyl, or a protecting group (see, e.g., U.S. Pat. No. 7,427,672); 4′-CH₂—C(H)(CH₃)-2′ (see, e.g., Chattopadhyaya et al., J. Org. Chem., 2009, 74, 118-134); and 4′-CH₂—C(═CH₂)-2′ (and analogs thereof; see, e.g., U.S. Pat. No. 8,278,426). The entire contents of each of the foregoing are hereby incorporated herein by reference.

[0223] Additional representative U.S. Patents and US Patent Publications that teach the preparation of locked nucleic acid nucleotides include, but are not limited to, the following: U.S. Pat. Nos. 6,268,490; 6,525,191; 6,670,461; 6,770,748; 6,794,499; 6,998,484; 7,053,207; 7,034,133; 7,084,125; 7,399,845; 7,427,672; 7,569,686; 7,741,457; 8,022,193; 8,030,467; 8,278,425; 8,278,426; 8,278,283; US 2008/0039618; and US 2009/0012281, the entire contents of each of which are hereby incorporated herein by reference.

[0224] Any of the foregoing bicyclic nucleosides can be prepared having one or more stereochemical sugar configurations including for example α-L-ribofuranose and β-D-ribofuranose (see WO 99/14226).

[0225] A dsRNA can be modified to include one or more constrained ethyl nucleosides. As used herein, a “constrained ethyl nucleoside” or “cEt” is a locked nucleoside comprising a bicyclic sugar moiety comprising a 4′-CH(CH₃)—O-2′ bridge. In one aspect, a constrained ethyl nucleoside is in the S conformation referred to herein as “S-cEt.”

[0226] A dsRNA described herein can include one or more “conformationally restricted nucleosides” (“CRN”). CRN are nucleoside analogs with a linker connecting the C2′ and C4′ carbons of ribose or the C3 and —C5′ carbons of ribose. CRN lock the ribose ring into a stable conformation and increase the hybridization affinity to mRNA. The linker is of sufficient length to place the oxygen in an optimal position for stability and affinity resulting in less ribose ring puckering.

[0227] Representative publications that teach the preparation of certain of the above noted CRN include, but are not limited to, US Patent Publication No. 2013/0190383; and PCT publication WO 2013/036868, the entire contents of each of which are hereby incorporated herein by reference.

[0228] In some aspects, a dsRNA comprises one or more monomers that are UNA (unlocked nucleoside) nucleosides. UNA is unlocked acyclic nucleoside, wherein any of the bonds of the sugar has been removed, forming an unlocked “sugar” residue. In one example, UNA also encompasses monomer with bonds between C1′-C4′ have been removed (i.e. the covalent carbon-oxygen-carbon bond between the C1′ and C4′ carbons). In another example, the C2′-C3′ bond (i.e. the covalent carbon-carbon bond between the C2′ and C3′ carbons) of the sugar has been removed (see Nuc. Acids Symp. Series, 52, 133-134 (2008) and Fluiter et al., Mol. Biosyst., 2009, 10, 1039 hereby incorporated by reference).

[0229] Representative U.S. publications that teach the preparation of UNA include, but are not limited to, U.S. Pat. No. 8,314,227; and US Patent Publication Nos. 2013/0096289; 2013/0011922; and 2011/0313020, the entire contents of each of which are hereby incorporated herein by reference.

[0230] The ribose molecule can be modified with a cyclopropane ring to produce a tricyclodeoxynucleic acid (tricyclo DNA). The ribose moiety can be substituted for another sugar such as 1,5,-anhydrohexitol, threose to produce a threose nucleoside (TNA), or arabinose to produce an arabino nucleoside. The ribose molecule can be replaced with non-sugars such as cyclohexene to produce cyclohexene nucleoside or glycol to produce glycol nucleosides.

[0231] Potentially stabilizing modifications to the ends of nucleoside molecules can include N-(acetylaminocaproyl)-4-hydroxyprolinol (Hyp-C6-NHAc), N-(caproyl-4-hydroxyprolinol (Hyp-C6), N-(acetyl-4-hydroxyprolinol (Hyp-NHAc), thymidine-2′-O-deoxythymidine (ether), N-(aminocaproyl)-4-hydroxyprolinol (Hyp-C6-amino), 2-docosanoyl-uridine-3″-phosphate, inverted base dT(idT) and others. Disclosure of this modification can be found in PCT Publication No. WO 2011/005861.

[0232] Other alternatives chemistries of a dsRNA include a 5′ phosphate or 5′ phosphate mimic, e.g., a 5′-terminal phosphate or phosphate mimic on the antisense strand of a dsRNA. Suitable phosphate mimics are disclosed in, for example US Patent Publication No. 2012/0157511, the entire contents of which are incorporated herein by reference.

[0233] Exemplary dsRNAs comprise nucleosides with alternative sugar moieties and can comprise DNA or RNA nucleosides. In some aspects, the dsRNA comprises nucleosides comprising alternative sugar moieties and DNA nucleosides. Incorporation of alternative nucleosides into the dsRNA can enhance the affinity of the dsRNA for the target nucleic acid. In that case, the alternative nucleosides can be referred to as affinity enhancing alternative nucleotides.

[0234] In some aspects, the dsRNA comprises at least 1 alternative nucleoside, such as at least 2, at least 3, at least 4, at least 5, at least 6, at least 7, at least 8, at least 9, at least 10, at least 11, at least 12, at least 13, at least 14, at least 15, or at least 16 alternative nucleosides. In other aspects, the dsRNAs comprise from 1 to 10 alternative nucleosides, such as from 2 to 9 alternative nucleosides, such as from 3 to 8 alternative nucleosides, such as from 4 to 7 alternative nucleosides, such as 6 or 7 alternative nucleosides. In an aspect, the dsRNA can comprise alternatives, which are independently selected from these three types of alternative (alternative sugar moiety, alternative nucleobase, and alternative internucleoside linkage), or a combination thereof. In one aspect, the dsRNA comprises one or more nucleosides comprising alternative sugar moieties, e.g., 2′ sugar alternative nucleosides. In some aspects, the dsRNA comprise the one or more 2′ sugar alternative nucleoside independently selected from the group consisting of 2′-O-alkyl-RNA, 2′-O-methyl-RNA, 2′-alkoxy-RNA, 2′-O-methoxyethyl-RNA, 2′-amino-DNA, 2′-fluoro-DNA, arabino nucleic acid (ANA), 2′-fluoro-ANA, and BNA (e.g., LNA) nucleosides. In some aspects, the one or more alternative nucleoside is a BNA.

[0235] In some aspects, at least 1 of the alternative nucleosides is a BNA (e.g., an LNA), such as at least 2, such as at least 3, at least 4, at least 5, at least 6, at least 7, or at least 8 of the alternative nucleosides are BNAs. In a still further aspect, all the alternative nucleosides are BNAs.

[0236] In a further aspect the dsRNA comprises at least one alternative internucleoside linkage. In some aspects, the internucleoside linkages within the contiguous nucleotide sequence are phosphorothioate or boronophosphate internucleoside linkages. In some aspects, all the internucleotide linkages in the contiguous sequence of the oligonucleotide are phosphorothioate linkages. In some aspects, the phosphorothioate linkages are stereochemically pure phosphorothioate linkages. In some aspects, the phosphorothioate linkages are Sp phosphorothioate linkages. In other aspects, the phosphorothioate linkages are Rp phosphorothioate linkages.

[0237] In some aspects, the dsRNA comprises at least one alternative nucleoside which is a 2′-MOE-RNA, such as 2, 3, 4, 5, 6, 7, 8, 9, or 10 2′-MOE-RNA nucleoside units. In some aspects, the 2′-MOE-RNA nucleoside units are connected by phosphorothioate linkages. In some aspects, at least one of said alternative nucleoside is 2′-fluoro DNA, such as 2, 3, 4, 5, 6, 7, 8, 9, or 10 2′-fluoro-DNA nucleoside units. In some aspects, the dsRNA comprises at least one BNA unit and at least one 2′ substituted modified nucleoside. In some aspects, the dsRNA comprises both 2′ sugar modified nucleosides and DNA units.

B. dsRNAs Conjugated to Ligands

[0238] dsRNAs can be chemically linked to one or more ligands, moieties, or conjugates that enhance the activity, cellular distribution, or cellular uptake of the dsRNA. Such moieties include but are not limited to lipid moieties such as a cholesterol moiety (Letsinger et al., (1989) Proc. Natl. Acid. Sci. USA, 86: 6553-6556), cholic acid (Manoharan et al., (1994) Biorg. Med. Chem. Let., 4:1053-1060), a thioether, e.g., beryl-S-tritylthiol (Manoharan et al., (1992) Ann. N.Y. Acad. Sci., 660:306-309; Manoharan et al., (1993) Biorg. Med. Chem. Let., 3:2765-2770), a thiocholesterol (Oberhauser et al., (1992) Nucl. Acids Res., 20:533-538), an aliphatic chain, e.g., dodecandiol or undecyl residues (Saison-Behmoaras et al., (1991) EMBO J, 10:1111-1118; Kabanov et al., (1990) FEBS Lett., 259:327-330; Svinarchuk et al., (1993) Biochimie, 75:49-54), a phospholipid, e.g., di-hexadecyl-rac-glycerol or triethyl-ammonium 1,2-di-O-hexadecyl-rac-glycero-3-phosphonate (Manoharan et al., (1995) Tetrahedron Lett., 36:3651-3654; Shea et al., (1990) Nucl. Acids Res., 18:3777-3783), a polyamine or a polyethylene glycol chain (Manoharan et al., (1995) Nucleosides & Nucleotides, 14:969-973), or adamantane acetic acid (Manoharan et al., (1995) Tetrahedron Lett., 36:3651-3654), a palmityl moiety (Mishra et al., (1995) Biochim. Biophys. Acta, 1264:229-237), or an octadecylamine or hexylamino-carbonyloxycholesterol moiety (Crooke et al., (1996) J. Pharmacol. Exp. Ther., 277:923-937).

[0239] In one aspect, a ligand alters the distribution, targeting, or lifetime of a dsRNA agent into which it is incorporated. In some aspects, a ligand provides an enhanced affinity for a selected target, e.g., molecule, cell or cell type, compartment, e.g., a cellular or organ compartment, tissue, organ, or region of the body, as, e.g., compared to a species absent such a ligand. Some ligands will not take part in duplex pairing in a duplexed nucleic acid.

[0240] Ligands can include a naturally occurring substance, such as a protein (e.g., human serum albumin (HSA), low-density lipoprotein (LDL), or globulin); carbohydrate (e.g., a dextran, pullulan, chitin, chitosan, inulin, cyclodextrin, N-acetylglucosamine, N-acetylgalactosamine, or hyaluronic acid); or a lipid. The ligand can be a recombinant or synthetic molecule, such as a synthetic polymer, e.g., a synthetic polyamino acid. Examples of polyamino acids include polyamino acid is a polylysine (PLL), poly L-aspartic acid, poly L-glutamic acid, styrene-maleic acid anhydride copolymer, poly(L-lactide-co-glycolied) copolymer, divinyl ether-maleic anhydride copolymer, N-(2-hydroxypropyl)methacrylamide copolymer (HMPA), polyethylene glycol (PEG), polyvinyl alcohol (PVA), polyurethane, poly(2-ethylacryllic acid), N-isopropylacrylamide polymers, or polyphosphazine. Example of polyamines include: polyethylenimine, polylysine (PLL), spermine, spermidine, polyamine, pseudopeptide-polyamine, peptidomimetic polyamine, dendrimer polyamine, arginine, amidine, protamine, cationic lipid, cationic porphyrin, quaternary salt of a polyamine, or an alpha helical peptide.

[0241] Ligands can include targeting groups, e.g., a cell or tissue targeting agent, e.g., a lectin, glycoprotein, lipid or protein, e.g., an antibody, that binds to a specified cell type such as a kidney cell. A targeting group can be a thyrotropin, melanotropin, lectin, glycoprotein, surfactant protein A, Mucin carbohydrate, multivalent lactose, multivalent galactose, N-acetyl-galactosamine, N-acetyl-gulucosamine multivalent mannose, multivalent fucose, glycosylated polyaminoacids, multivalent galactose, transferrin, bisphosphonate, polyglutamate, polyaspartate, a lipid, cholesterol, a steroid, bile acid, folate, vitamin B12, vitamin A, biotin, or an RGD peptide or RGD peptide mimetic.

[0242] Other examples of ligands include dyes, intercalating agents (e.g. acridines), cross-linkers (e.g. psoralen, mitomycin C), porphyrins (TPPC4, texaphyrin, Sapphyrin), polycyclic aromatic hydrocarbons (e.g., phenazine, dihydrophenazine), artificial endonucleases (e.g. EDTA), lipophilic molecules, e.g., cholesterol, cholic acid, adamantane acetic acid, 1-pyrene butyric acid, dihydrotestosterone, 1,3-Bis-O(hexadecyl)glycerol, geranyloxyhexyl group, hexadecylglycerol, borneol, menthol, 1,3-propanediol, heptadecyl group, palmitic acid, myristic acid,O3-(oleoyl)lithocholic acid, 03-(oleoyl)cholenic acid, dimethoxytrityl, or phenoxazine) and peptide conjugates (e.g., antennapedia peptide, Tat peptide), alkylating agents, phosphate, amino, mercapto, PEG (e.g., PEG-40K), MPEG, [MPEG]₂, polyamino, alkyl, substituted alkyl, radiolabeled markers, enzymes, haptens (e.g. biotin), transport/absorption facilitators (e.g., aspirin, vitamin E, folic acid), synthetic ribonucleases (e.g., imidazole, bisimidazole, histamine, imidazole clusters, acridine-imidazole conjugates, Eu3+ complexes of tetraazamacrocycles), dinitrophenyl, HRP, or AP.

[0243] Ligands can be proteins, e.g., glycoproteins, or peptides, e.g., molecules having a specific affinity for a co-ligand, or antibodies e.g., an antibody, that binds to a specified cell type such as a hepatic cell. Ligands can include hormones and hormone receptors. They can include non-peptidic species, such as lipids, lectins, carbohydrates, vitamins, cofactors, multivalent lactose, multivalent galactose, N-acetyl-galactosamine, N-acetyl-gulucosamine multivalent mannose, or multivalent fucose.

[0244] The ligand can be a substance, e.g., a drug, which can increase the uptake of the dsRNA agent into the cell, for example, by disrupting the cell's cytoskeleton, e.g., by disrupting the cell's microtubules, microfilaments, and/or intermediate filaments. The drug can be, for example, taxon, vincristine, vinblastine, cytochalasin, nocodazole, japlakinolide, latrunculin A, phalloidin, swinholide A, indanocine, or myoservin.

[0245] In some aspects, a ligand attached to a dsRNA as described herein acts as a pharmacokinetic modulator (PK modulator). PK modulators include lipophiles, bile acids, steroids, phospholipid analogues, peptides, protein binding agents, PEG, vitamins etc. Exemplary PK modulators include, but are not limited to, cholesterol, fatty acids, cholic acid, lithocholic acid, dialkylglycerides, diacylglyceride, phospholipids, sphingolipids, naproxen, ibuprofen, vitamin E, biotin etc. dsRNA that comprise a number of phosphorothioate linkages are also known to bind to serum protein, thus short oligonucleotides, e.g., oligonucleotides of about 5 bases, 10 bases, 15 bases, or 20 bases, comprising multiple of phosphorothioate linkages in the backbone are also amenable as ligands (e.g. as PK modulating ligands). In addition, aptamers that bind serum components (e.g. serum proteins) are also suitable for use as PK modulating ligands in the aspects described herein.

[0246] Ligand-conjugated dsRNAs can be synthesized by the use of a dsRNA that bears a pendant reactive functionality, such as that derived from the attachment of a linking molecule onto the dsRNA (described below). This reactive dsRNA can be reacted directly with commercially-available ligands, ligands that are synthesized bearing any of a variety of protecting groups, or ligands that have a linking moiety attached thereto.

[0247] The dsRNAs used in the conjugates can be conveniently and routinely made through the well-known technique of solid-phase synthesis. Equipment for such synthesis is sold by several vendors including, for example, Applied Biosystems (Foster City, Calif.). Any other means for such synthesis known in the art can additionally or alternatively be employed. It is also known to use similar techniques to prepare other dsRNA, such as the phosphorothioates and alkylated derivatives.

[0248] In the ligand-conjugated dsRNA, such as the ligand-molecule bearing sequence-specific linked nucleosides, the oligonucleotides and oligonucleosides can be assembled on a suitable DNA synthesizer utilizing standard nucleotide or nucleoside precursors, or nucleotide or nucleoside conjugate precursors that already bear the linking moiety, ligand-nucleotide or nucleoside-conjugate precursors that already bear the ligand molecule, or non-nucleoside ligand-bearing building blocks.

[0249] When using conjugate precursors that already bear a linking moiety, the synthesis of the sequence-specific linked nucleosides is typically completed, and the ligand molecule is then reacted with the linking moiety to form the ligand-conjugated dsRNAs. In some aspects, the oligonucleotides or linked nucleosides described herein are synthesized by an automated synthesizer using phosphoramidites derived from ligand-nucleoside conjugates in addition to the standard phosphoramidites and non-standard phosphoramidites that are commercially available and routinely used in oligonucleotide synthesis.

i. Lipid Conjugates

[0250] In one aspect, the ligand or conjugate is a lipid or lipid-based molecule. Such a lipid or lipid-based molecule can bind a serum protein, e.g., human serum albumin (HSA). An HSA binding ligand allows for distribution of the conjugate to a target tissue, e.g., a non-kidney target tissue of the body. A lipid or lipid-based ligand can (a) increase resistance to degradation of the conjugate, (b) increase targeting or transport into a target cell or cell membrane, and/or (c) can be used to adjust binding to a serum protein, e.g., HSA.

[0251] In another aspect, the ligand is a moiety, e.g., a vitamin, which is taken up by a target cell, e.g., a proliferating cell. Exemplary vitamins include vitamin A, E, and K.

ii. Cell Permeation Agents

[0252] In another aspect, the ligand is a cell-permeation agent, such as a helical cell-permeation agent. In one aspect, the agent is amphipathic. An exemplary agent is a peptide such as tat or antennopedia. If the agent is a peptide, it can be modified, including a peptidylmimetic, invertomers, non-peptide or pseudo-peptide linkages, and use of D-amino acids. In one aspect, the helical agent is an alpha-helical agent, which can have a lipophilic and a lipophobic phase.

[0253] The ligand can be a peptide or peptidomimetic. A peptidomimetic (also referred to herein as an oligopeptidomimetic) is a molecule capable of folding into a defined three-dimensional structure similar to a natural peptide. The attachment of peptide and peptidomimetics to dsRNA agents can affect pharmacokinetic distribution of the dsRNA, such as by enhancing cellular recognition and absorption. The peptide or peptidomimetic moiety can be about 5-50 amino acids long, e.g., about 5, 10, 15, 20, 25, 30, 35, 40, 45, or 50 amino acids long.

[0254] A peptide or peptidomimetic can be, for example, a cell permeation peptide, cationic peptide, amphipathic peptide, or hydrophobic peptide (e.g., consisting primarily of Tyr, Trp, or Phe). The peptide moiety can be a dendrimer peptide, constrained peptide or crosslinked peptide. In another alternative, the peptide moiety can include a hydrophobic membrane translocation sequence (MTS). An exemplary hydrophobic MTS-containing peptide is RFGF having the amino acid sequence AAVALLPAVLLALLAP. An RFGF analogue (e.g., amino acid sequence AALLPVLLAAP containing a hydrophobic MTS can be a targeting moiety. The peptide moiety can be a “delivery” peptide, which can carry large polar molecules including peptides, oligonucleotides, and protein across cell membranes. For example, sequences from the HIV Tat protein (GRKKRRQRRRPPQ and the Drosophila Antennapedia protein (RQIKIWFQNRRMKWKK have been found to be capable of functioning as delivery peptides. A peptide or peptidomimetic can be encoded by a random sequence of DNA, such as a peptide identified from a phage-display library, or one-bead-one-compound (OBOC) combinatorial library (Lam et al., Nature, 354:82-84, 1991). Examples of a peptide or peptidomimetic tethered to a dsRNA agent via an incorporated monomer unit for cell targeting purposes is an arginine-glycine-aspartic acid (RGD)-peptide, or RGD mimic. A peptide moiety can range in length from about 5 amino acids to about 40 amino acids. The peptide moieties can have a structural modification, such as to increase stability or direct conformational properties. Any of the structural modifications described below can be utilized.

[0255] An RGD peptide for use in the compositions and methods can be linear or cyclic, and can be modified, e.g., glycosylated or methylated, to facilitate targeting to a specific tissue(s). RGD-containing peptides and peptidiomimemtics can include D-amino acids, as well as synthetic RGD mimics. In addition to RGD, one can use other moieties that target the integrin ligand. Some conjugates of this ligand target PECAM-1 or VEGF.

[0256] A cell permeation peptide is capable of permeating a cell, e.g., a microbial cell, such as a bacterial or fungal cell, or a mammalian cell, such as a human cell. A microbial cell-permeating peptide can be, for example, an α-helical linear peptide (e.g., LL-37 or Ceropin P1), a disulfide bond-containing peptide (e.g., α-defensin,β-defensin, or bactenecin), or a peptide containing only one or two dominating amino acids (e.g., PR-39 or indolicidin). A cell permeation peptide can include a nuclear localization signal (NLS). For example, a cell permeation peptide can be a bipartite amphipathic peptide, such as MPG, which is derived from the fusion peptide domain of HIV-1 gp41 and the NLS of SV40 large T antigen (Simeoni et al., Nucl. Acids Res. 31:2717-2724, 2003).

iii. Carbohydrate Conjugates

[0257] In some aspects of the compositions and methods, a dsRNA further comprises a carbohydrate. As used herein, “carbohydrate” refers to a compound which is either a carbohydrate per se made up of one or more monosaccharide units having at least 6 carbon atoms (which can be linear, branched or cyclic) with an oxygen, nitrogen or sulfur atom bonded to each carbon atom; or a compound having as a part thereof a carbohydrate moiety made up of one or more monosaccharide units each having at least six carbon atoms (which can be linear, branched or cyclic), with an oxygen, nitrogen or sulfur atom bonded to each carbon atom. Representative carbohydrates include the sugars (mono-, di-, tri- and oligosaccharides containing from about 4, 5, 6, 7, 8, or 9 monosaccharide units), and polysaccharides such as starches, glycogen, cellulose and polysaccharide gums. Specific monosaccharides include C5 and above (e.g., C5, C6, C7, or C8) sugars; di- and trisaccharides include sugars having two or three monosaccharide units (e.g., C5, C6, C7, or C8).

[0258] In one aspect, a carbohydrate conjugate for use in the compositions and methods is a monosaccharide.

[0259] In some aspects, the carbohydrate conjugate further comprises one or more additional ligands as described above, such as, but not limited to, a PK modulator and/or a cell permeation peptide.

[0260] Additional carbohydrate conjugates (and linkers) suitable for use include those described in PCT Publication Nos. WO 2014/179620 and WO 2014/179627, the entire contents of each of which are incorporated herein by reference.

iv. Linkers

[0261] In some aspects, the conjugate or ligand described herein can be attached to a dsRNA with various linkers that can be cleavable or non-cleavable.

[0262] Linkers typically comprise a direct bond or an atom such as oxygen or sulfur, a unit such as NR⁸, C(O), C(O)NH, SO, SO₂, SO₂NH or a chain of atoms, such as, but not limited to, substituted or unsubstituted alkyl, substituted or unsubstituted alkenyl, substituted or unsubstituted alkynyl, arylalkyl, arylalkenyl, arylalkynyl, heteroarylalkyl, heteroarylalkenyl, heteroarylalkynyl, heterocyclylalkyl, heterocyclylalkenyl, heterocyclylalkynyl, aryl, heteroaryl, heterocyclyl, cycloalkyl, cycloalkenyl, alkylarylalkyl, alkylarylalkenyl, alkylarylalkynyl, alkenylarylalkyl, alkenylarylalkenyl, alkenylarylalkynyl, alkynylarylalkyl, alkynylarylalkenyl, alkynylarylalkynyl, alkylheteroarylalkyl, alkylheteroarylalkenyl, alkylheteroarylalkynyl, alkenylheteroarylalkyl, alkenylheteroarylalkenyl, alkenylheteroarylalkynyl, alkynylheteroarylalkyl, alkynylheteroarylalkenyl, alkynylheteroarylalkynyl, alkylheterocyclylalkyl, alkylheterocyclylalkenyl, alkylhererocyclylalkynyl, alkenylheterocyclylalkyl, alkenylheterocyclylalkenyl, alkenylheterocyclylalkynyl, alkynylheterocyclylalkyl, alkynylheterocyclylalkenyl, alkynylheterocyclylalkynyl, alkylaryl, alkenylaryl, alkynylaryl, alkylheteroaryl, alkenylheteroaryl, alkynylhereroaryl, which one or more methylenes can be interrupted or terminated by O, S, S(O), SO₂, N(R⁸), C(O), substituted or unsubstituted aryl, substituted or unsubstituted heteroaryl, substituted or unsubstituted heterocyclic; where R⁸ is hydrogen, acyl, aliphatic or substituted aliphatic. In one aspect, the linker is between about 1-24, 2-24, 3-24, 4-24, 5-24, 6-24, 6-18, 7-18, 8-18, 7-17, 8-17, 6-16, 7-17, or 8-16 or 1, 2, 3, 4, 5, 6, 7, 8, 9, 10, 11, 12, 13, 14, 15, 16, 17, 18, 19, 20, 21, 22, 23, or 24 atoms.

[0263] A cleavable linking group is one which is sufficiently stable outside the cell, but which upon entry into a target cell is cleaved to release the two parts the linker is holding together. In some aspects, the cleavable linking group is cleaved at least about 10 times, 20, times, 30 times, 40 times, 50 times, 60 times, 70 times, 80 times, 90 times, or more, or at least about 100 times faster in a target cell or under a first reference condition (which can, e.g., be selected to mimic or represent intracellular conditions) than in the blood of a subject, or under a second reference condition (which can, e.g., be selected to mimic or represent conditions found in the blood or serum).

[0264] Cleavable linking groups are susceptible to cleavage agents, e.g., pH, redox potential, or the presence of degradative molecules. Generally, cleavage agents are more prevalent or found at higher levels or activities inside cells than in serum or blood. Examples of such degradative agents include: redox agents which are selective for particular substrates or which have no substrate specificity, including, e.g., oxidative or reductive enzymes or reductive agents such as mercaptans, present in cells, that can degrade a redox cleavable linking group by reduction; esterases; endosomes or agents that can create an acidic environment, e.g., those that result in a pH of five or lower; enzymes that can hydrolyze or degrade an acid cleavable linking group by acting as a general acid, peptidases (which can be substrate specific), and phosphatases.

[0265] A cleavable linkage group, such as a disulfide bond can be susceptible to pH. The pH of human serum is 7.4, while the average intracellular pH is slightly lower, ranging from about 7.1-7.3. Endosomes have a more acidic pH, in the range of 5.5-6.0, and lysosomes have an even more acidic pH at around 5.0. Some linkers will have a cleavable linking group that is cleaved at a certain pH, thereby releasing a cationic lipid from the ligand inside the cell, or into the desired compartment of the cell.

[0266] A linker can include a cleavable linking group that is cleavable by a particular enzyme. The type of cleavable linking group incorporated into a linker can depend on the cell to be targeted. For example, a liver-targeting ligand can be linked to a cationic lipid through a linker that includes an ester group. Liver cells are rich in esterases, and therefore the linker will be cleaved more efficiently in liver cells than in cell types that are not esterase-rich. Other cell-types rich in esterases include cells of the lung, renal cortex, and testis.

[0267] Linkers that contain peptide bonds can be used when targeting cell types rich in peptidases, such as liver cells and synoviocytes.

[0268] In general, the suitability of a candidate cleavable linking group can be evaluated by testing the ability of a degradative agent (or condition) to cleave the candidate linking group. It can also be desirable to test the candidate cleavable linking group for the ability to resist cleavage in the blood or when in contact with other non-target tissue. Thus, one can determine the relative susceptibility to cleavage between at least two conditions, where at least one is selected to be indicative of cleavage in a target cell and another is selected to be indicative of cleavage in other tissues or biological fluids, e.g., blood or serum. The evaluations can be carried out in cell free systems, in cells, in cell culture, in organ or tissue culture, or in whole animals. It can be useful to make initial evaluations in cell-free or culture conditions and to confirm by further evaluations in whole animals. In some aspects, useful candidate compounds are cleaved at least about 2, 4, 10, 20, 30, 40, 50, 60, 70, 80, 90, or 100 times faster in the cell (or under in vitro conditions selected to mimic intracellular conditions) as compared to blood or serum (or under in vitro conditions selected to mimic extracellular conditions).

a. Redox Cleavable Linking Groups

[0269] In one aspect, a cleavable linking group is a redox cleavable linking group that is cleaved upon reduction or oxidation. An example of reductively cleavable linking group is a disulphide linking group (—S—S—). To determine if a candidate cleavable linking group is a suitable “reductively cleavable linking group,” or for example is suitable for use with a particular dsRNA moiety and particular targeting agent one can look to methods described herein. For example, a candidate can be evaluated by incubation with dithiothreitol (DTT), or other reducing agent using reagents know in the art, which mimic the rate of cleavage which would be observed in a cell, e.g., a target cell. The candidates can be evaluated under conditions which are selected to mimic blood or serum conditions. In one aspect, candidate compounds are cleaved by at most about 10% in the blood. In other aspects, useful candidate compounds are degraded at least about 2, 4, 10, 20, 30, 40, 50, 60, 70, 80, 90, or 100 times faster in the cell (or under in vitro conditions selected to mimic intracellular conditions) as compared to blood (or under in vitro conditions selected to mimic extracellular conditions). The rate of cleavage of candidate compounds can be determined using standard enzyme kinetics assays under conditions chosen to mimic intracellular media and compared to conditions chosen to mimic extracellular media.

b. Phosphate-Based Cleavable Linking Groups

[0270] In another aspect, a cleavable linker comprises a phosphate-based cleavable linking group. A phosphate-based cleavable linking group is cleaved by agents that degrade or hydrolyze the phosphate group. An example of an agent that cleaves phosphate groups in cells are enzymes such as phosphatases in cells. Examples of phosphate-based linking groups are —O—P(O)(OR^{k})—O—, —O—P(S)(OR^{k})—O—, —O—P(S)(SR^{k})—O, —S—P(O)(OR^{k})—O—, —O—P(O)(OR^{k})—S—, —S—P(O)(OR^{k})—S—, —O—P(S)(OR^{k})—S—, —S—P(S)(OR^{k})—O—, —O—P(O)(R^{k})—O—, —O—P(S)(R^{k})—O—, —S—P(O)(R^{k})—O—, —S—P(S)(R^{k})—O—, —S—P(O)(R^{k})—S—, —O—P(S)(R^{k})—S—. These candidates can be evaluated using methods analogous to those described above.

c. Acid Cleavable Linking Groups

[0271] In another aspect, a cleavable linker comprises an acid cleavable linking group. An acid cleavable linking group is a linking group that is cleaved under acidic conditions. In some aspects, acid cleavable linking groups are cleaved in an acidic environment with a pH of about 6.5 or lower (e.g., about 6.0, 5.75, 5.5, 5.25, 5.0, or lower), or by agents such as enzymes that can act as a general acid. In a cell, specific low pH organelles, such as endosomes and lysosomes can provide a cleaving environment for acid cleavable linking groups. Examples of acid cleavable linking groups include but are not limited to hydrazones, esters, and esters of amino acids. Acid cleavable groups can have the general formula —C═NN—, C(O)O, or —OC(O). In one aspect, the carbon is attached to the oxygen of the ester (the alkoxy group) is an aryl group, substituted alkyl group, or tertiary alkyl group such as dimethyl pentyl or t-butyl. These candidates can be evaluated using methods analogous to those described above.

d. Ester-Based Linking Groups

[0272] In another aspect, a cleavable linker comprises an ester-based cleavable linking group. An ester-based cleavable linking group is cleaved by enzymes such as esterases and amidases in cells. Examples of ester-based cleavable linking groups include but are not limited to esters of alkylene, alkenylene and alkynylene groups. Ester cleavable linking groups have the general formula —C(O)O—, or —OC(O)—. These candidates can be evaluated using methods analogous to those described above.

e. Peptide-Based Cleaving Groups

[0273] In yet another aspect, a cleavable linker comprises a peptide-based cleavable linking group. A peptide-based cleavable linking group is cleaved by enzymes such as peptidases and proteases in cells. Peptide-based cleavable linking groups are peptide bonds formed between amino acids to yield oligopeptides (e.g., dipeptides, tripeptides etc.) and polypeptides. Peptide-based cleavable groups do not include the amide group (—C(O)NH—). The amide group can be formed between any alkylene, alkenylene, or alkynelene. A peptide bond is a special type of amide bond formed between amino acids to yield peptides and proteins. The peptide based cleavage group is generally limited to the peptide bond (i.e., the amide bond) formed between amino acids yielding peptides and proteins and does not include the entire amide functional group. Peptide-based cleavable linking groups have the general formula —NHCHR^{A}C(O)NHCHR^{B}C(O)—, where RA and R^{B} are the R groups of the two adjacent amino acids. These candidates can be evaluated using methods analogous to those described above.

[0274] In one aspect, a dsRNA is conjugated to a carbohydrate through a linker. Linkers include bivalent and trivalent branched linker groups. Linkers for dsRNA carbohydrate conjugates include, but are not limited to, those described in formulas 24-35 of PCT Publication No. WO 2018/195165.

[0275] Representative U.S. patents that teach the preparation of oligonucleotide conjugates include, but are not limited to, U.S. Pat. Nos. 4,828,979; 4,948,882; 5,218,105; 5,525,465; 5,541,313; 5,545,730; 5,552,538; 5,578,717, 5,580,731; 5,591,584; 5,109,124; 5,118,802; 5,138,045; 5,414,077; 5,486,603; 5,512,439; 5,578,718; 5,608,046; 4,587,044; 4,605,735; 4,667,025; 4,762,779; 4,789,737; 4,824,941; 4,835,263; 4,876,335; 4,904,582; 4,958,013; 5,082,830; 5,112,963; 5,214,136; 5,082,830; 5,112,963; 5,214,136; 5,245,022; 5,254,469; 5,258,506; 5,262,536; 5,272,250; 5,292,873; 5,317,098; 5,371,241, 5,391,723; 5,416,203, 5,451,463; 5,510,475; 5,512,667; 5,514,785; 5,565,552; 5,567,810; 5,574,142; 5,585,481; 5,587,371; 5,595,726; 5,597,696; 5,599,923; 5,599,928 and 5,688,941; 6,294,664; 6,320,017; 6,576,752; 6,783,931; 6,900,297; 7,037,646; 8,106,022, the entire contents of each of which are hereby incorporated herein by reference.

[0276] It is not necessary for all positions in a given compound to be uniformly modified, and in fact more than one of the aforementioned modifications can be incorporated in a single compound or even at a single nucleoside within a dsRNA. dsRNA compounds that are chimeric compounds are also contemplated. Chimeric dsRNAs typically contain at least one region wherein the RNA is modified so as to confer upon the dsRNA increased resistance to nuclease degradation, increased cellular uptake, and/or increased binding affinity for the target nucleic acid. An additional region of the dsRNA can serve as a substrate for enzymes capable of cleaving RNA:DNA or RNA:RNA hybrids. By way of example, RNase H is a cellular endonuclease which cleaves the RNA strand of an RNA:DNA duplex. Activation of RNase H, therefore, results in cleavage of the RNA target, thereby greatly enhancing the efficiency of dsRNA reduction of expression. Consequently, comparable results can often be obtained with shorter dsRNAs when chimeric dsRNAs are used, compared to phosphorothioate deoxy dsRNAs hybridizing to the same target region. Cleavage of the RNA target can be routinely detected by gel electrophoresis and, if necessary, associated nucleic acid hybridization techniques known in the art.

[0277] In certain instances, the nucleosides of a dsRNA can be modified by a non-ligand group. A number of non-ligand molecules have been conjugated to dsRNAs in order to enhance the activity, cellular distribution, or cellular uptake of the dsRNA, and procedures for performing such conjugations are available in the scientific literature. Such non-ligand moieties have included lipid moieties, such as cholesterol (Kubo, T. et al., Biochem. Biophys. Res. Comm, 2007, 365(1):54-61; Letsinger et al., Proc. Natl. Acad. Sci. USA, 1989, 86:6553), cholic acid (Manoharan et al., Bioorg. Med. Chem. Lett., 1994, 4:1053), a thioether, e.g., hexyl-S-tritylthiol (Manoharan et al., Ann. N.Y. Acad. Sci., 1992, 660:306; Manoharan et al., Bioorg. Med. Chem. Let., 1993, 3:2765), a thiocholesterol (Oberhauser et al., Nucl. Acids Res., 1992, 20:533), an aliphatic chain, e.g., dodecandiol or undecyl residues (Saison-Behmoaras et al., EMBO J., 1991, 10:111; Kabanov et al., FEBS Lett., 1990, 259:327; Svinarchuk et al., Biochimie, 1993, 75:49), a phospholipid, e.g., di-hexadecyl-rac-glycerol or triethylammonium 1,2-di-O-hexadecyl-rac-glycero-3-H-phosphonate (Manoharan et al., Tetrahedron Lett., 1995, 36:3651; Shea et al., Nucl. Acids Res., 1990, 18:3777), a polyamine or a polyethylene glycol chain (Manoharan et al., Nucleosides & Nucleotides, 1995, 14:969), or adamantane acetic acid (Manoharan et al., Tetrahedron Lett., 1995, 36:3651), a palmityl moiety (Mishra et al., Biochim. Biophys. Acta, 1995, 1264:229), or an octadecylamine or hexylamino-carbonyl-oxycholesterol moiety (Crooke et al., J. Pharmacol. Exp. Ther., 1996, 277:923). Representative United States patents that teach the preparation of such dsRNA conjugates have been listed above. Typical conjugation protocols involve the synthesis of a dsRNA bearing an aminolinker at one or more positions of the sequence. The amino group is then reacted with the molecule being conjugated using appropriate coupling or activating reagents. The conjugation reaction can be performed either with the dsRNA still bound to the solid support or following cleavage of the dsRNA, in solution phase. Purification of the dsRNA conjugate by HPLC typically affords the pure conjugate.

### IV. Pharmaceutical Uses

[0278] The dsRNA compositions described herein are useful in the methods and, while not bound by theory, are believed to exert their desirable effects through their ability to modulate the level, status, and/or activity of a MutSβ heterodimer comprising MSH3, e.g., by reducing the activity or level of the MSH3 protein in a cell in a mammal.

[0279] Methods of treating disorders related to DNA mismatch repair such as nucleotide repeat expansion disorders (e.g., trinucleotide repeat expansion disorders) in a subject in need thereof are also contemplated. Another aspect includes reducing the level of MSH3 in a cell of a subject identified as having a nucleotide repeat expansion disorder (e.g., trinucleotide repeat expansion disorders). Still another aspect includes a method of reducing expression of MSH3 in a cell in a subject. Further aspects include methods of decreasing nucleotide repeat expansion in a cell (e.g., trinucleotide repeat expansion). The methods include contacting a cell with a dsRNA, in an amount effective to reduce expression of MSH3 in the cell, thereby reducing expression of MSH3 in the cell.

[0280] Based on the above methods, a dsRNA, or a composition comprising such a dsRNA, for use in therapy, or for use as a medicament, or for use in treating disorders related to DNA mismatch repair such as trinucleotide repeat expansion disorders in a subject in need thereof, or for use in reducing the level of MSH3 in a cell of a subject identified as having a trinucleotide repeat expansion disorder, or for use in reducing expression of MSH3 in a cell in a subject, or for use in decreasing trinucleotide repeat expansion in a cell is contemplated. The uses include the contacting of a cell with the dsRNA, in an amount effective to reduce expression of MSH3 in the cell, thereby reducing expression of MSH3 in the cell. Aspects described below in relation to the methods are also applicable to these further aspects.

[0281] Contacting of a cell with a dsRNA, e.g., a double stranded dsRNA, can be done in vitro or in vivo. Contacting a cell in vivo with the dsRNA includes contacting a cell or group of cells within a subject, e.g., a human subject, with the dsRNA. Combinations of in vitro and in vivo methods of contacting a cell are also possible. Contacting a cell can be direct or indirect, as discussed above. Furthermore, contacting a cell can be accomplished via a targeting ligand, including any ligand described herein or known in the art. In some aspects, the targeting ligand is a carbohydrate moiety, e.g., a GalNAc₃ ligand, or any other ligand that directs the dsRNA to a site of interest. Cells can include those of the central nervous system, or muscle cells.

[0282] Reducing expression of MSH3 includes any level of reduction of MSH3, e.g., at least partial suppression of the expression of a MSH3, such as a reduction by at least about 20%. In some aspects, the reduction is by at least about 25%, at least about 30%, at least about 35%, at least about 40%, at least about 45%, at least about 50%, at least about 55%, at least about 60%, at least about 65%, at least about 70%, at least about 75%, at least about 80%, at least about 85%, at least about 90%, at least about 91%, at least about 92%, at least about 93%, at least about 94%, at least about 95%, at least about 96%, at least about 97%, at least about 98%, or at least about 99%.

[0283] The expression of MSH3 can be assessed based on the level of any variable associated with MSH3 expression, e.g., MSH3 mRNA level or MSH3 protein level.

[0284] Reduction can be assessed by a decrease in an absolute or relative level of one or more of these variables compared with a control level. The control level can be any type of control level that is utilized in the art, e.g., a pre-dose baseline level, or a level determined from a similar subject, cell, or sample that is untreated or treated with a control (such as, e.g., buffer only control or inactive agent control).

[0285] In some aspects, surrogate markers can be used to detect reduction of MSH3. For example, effective treatment of a trinucleotide repeat expansion disorder, as demonstrated by acceptable diagnostic and monitoring criteria with an agent to reduce MSH3 expression can be understood to demonstrate a clinically relevant reduction in MSH3.

[0286] In some aspects of the methods, expression of a MSH3 is reduced by at least 20%, 25%, 30%, 35%, 40%, 45%, 50%, 55%, 60%, 65%, 70%, 75%, 80%, 85%, 90%, or 95%, or to below the level of detection of the assay. In some aspects, the methods include a clinically relevant reduction of expression of MSH3, e.g., as demonstrated by a clinically relevant outcome after treatment of a subject with an agent to reduce the expression of MSH3.

[0287] Reduction of the expression of MSH3 can be manifested by a reduction of the amount of mRNA expressed by a first cell or group of cells (such cells can be present, for example, in a sample derived from a subject) in which MSH3 is transcribed and which has or have been treated (e.g., by contacting the cell or cells with a dsRNA, or by administering a dsRNA to a subject in which the cells are or were present) such that the expression of MSH3 is reduced, as compared to a second cell or group of cells substantially identical to the first cell or group of cells but which has not or have not been so treated (control cell(s) not treated with a dsRNA or not treated with a dsRNA targeted to the gene of interest). The degree of reduction can be expressed in terms of:

$$\frac{( mRNA in control cells ) - ( mRNA in treated cells )}{( mRNA in control cells )} \times 100 \%$$

[0288] In other aspects, reduction of the expression of MSH3 can be assessed in terms of a reduction of a parameter that is functionally linked to MSH3 expression, e.g., MSH3 protein expression or MSH3 signaling pathways. MSH3 silencing can be determined in any cell expressing MSH3, either endogenous or heterologous from an expression construct, and by any assay known in the art.

[0289] Reduction of the expression of a MSH3 protein can be manifested by a reduction in the level of the MSH3 protein that is expressed by a cell or group of cells (e.g., the level of protein expressed in a sample derived from a subject). As explained above, for the assessment of mRNA suppression, the reduction of protein expression levels in a treated cell or group of cells can similarly be expressed as a percentage of the level of protein in a control cell or group of cells.

[0290] A control cell or group of cells that can be used to assess the reduction of the expression of MSH3 includes a cell or group of cells that has not yet been contacted with a dsRNA. For example, the control cell or group of cells can be derived from an individual subject (e.g., a human or animal subject) prior to treatment of the subject with a dsRNA.

[0291] The level of MSH3 mRNA that is expressed by a cell or group of cells can be determined using any method known in the art for assessing mRNA expression. In one aspect, the level of expression of MSH3 in a sample is determined by detecting a transcribed polynucleotide, or portion thereof, e.g., mRNA of the MSH3 gene. RNA can be extracted from cells using RNA extraction techniques including, for example, using acid phenol/guanidine isothiocyanate extraction (RNAzol B; Biogenesis), RNEASY™ RNA preparation kits (Qiagen) or PAXgene (PreAnalytix, Switzerland). Typical assay formats utilizing ribonucleic acid hybridization include nuclear run-on assays, RT-PCR, RNase protection assays, northern blotting, in situ hybridization, and microarray analysis. Circulating MSH3 mRNA can be detected using methods the described in PCT Publication WO2012/177906, the entire contents of which are hereby incorporated herein by reference. In some aspects, the level of expression of MSH3 is determined using a nucleic acid probe. The term “probe,” as used herein, refers to any molecule that is capable of selectively binding to a specific MSH3 sequence, e.g. to an mRNA or polypeptide. Probes can be synthesized by one of skill in the art, or derived from appropriate biological preparations. Probes can be specifically designed to be labeled. Examples of molecules that can be utilized as probes include, but are not limited to, RNA, DNA, proteins, antibodies, and organic molecules.

[0292] Isolated mRNA can be used in hybridization or amplification assays that include, but are not limited to, Southern or northern analyses, polymerase chain reaction (PCR) analyses, and probe arrays. One method for the determination of mRNA levels involves contacting the isolated mRNA with a nucleic acid molecule (probe) that can hybridize to MSH3 mRNA. In one aspect, the mRNA is immobilized on a solid surface and contacted with a probe, for example by running the isolated mRNA on an agarose gel and transferring the mRNA from the gel to a membrane, such as nitrocellulose. In an alternative aspect, the probe(s) are immobilized on a solid surface and the mRNA is contacted with the probe(s), for example, in an AFFYMETRIX gene chip array. A skilled artisan can readily adapt known mRNA detection methods for use in determining the level of MSH3 mRNA.

[0293] An alternative method for determining the level of expression of MSH3 in a sample involves the process of nucleic acid amplification and/or reverse transcriptase (to prepare cDNA) of for example mRNA in the sample, e.g., by RT-PCR (the experimental aspect set forth in Mullis, 1987, U.S. Pat. No. 4,683,202), ligase chain reaction (Barany (1991) Proc. Natl. Acad. Sci. USA 88:189-193), self-sustained sequence replication (Guatelli et al. (1990) Proc. Natl. Acad. Sci. USA 87:1874-1878), transcriptional amplification system (Kwoh et al. (1989) Proc. Natl. Acad. Sci. USA 86:1173-1177), Q-Beta Replicase (Lizardi et al. (1988) Bio/Technology 6:1197), rolling circle replication (Lizardi et al., U.S. Pat. No. 5,854,033) or any other nucleic acid amplification method, followed by the detection of the amplified molecules using techniques well known to those of skill in the art. These detection schemes are especially useful for the detection of nucleic acid molecules if such molecules are present in very low numbers. In particular aspects, the level of expression of MSH3 is determined by quantitative fluorogenic RT-PCR (i.e., the TAQMAN™ System) or the DUAL-GLO® Luciferase assay.

[0294] The expression levels of MSH3 mRNA can be monitored using a membrane blot (such as used in hybridization analysis such as northern, Southern, dot, and the like), or microwells, sample tubes, gels, beads or fibers (or any solid support comprising bound nucleic acids). See U.S. Pat. Nos. 5,770,722; 5,874,219; 5,744,305; 5,677,195; and 5,445,934, which are incorporated herein by reference. The determination of MSH3 expression level can comprise using nucleic acid probes in solution.

[0295] In some aspects, the level of mRNA expression is assessed using branched DNA (bDNA) assays or real time PCR (qPCR). The use of this PCR method is described and exemplified in the Examples presented herein. Such methods can be used for the detection of MSH3 nucleic acids.

[0296] The level of MSH3 protein expression can be determined using any method known in the art for the measurement of protein levels. Such methods include, for example, electrophoresis, capillary electrophoresis, high performance liquid chromatography (HPLC), thin layer chromatography (TLC), hyperdiffusion chromatography, fluid or gel precipitin reactions, absorption spectroscopy, a colorimetric assays, spectrophotometric assays, flow cytometry, immunodiffusion (single or double), immunoelectrophoresis, western blotting, radioimmunoassay (RIA), enzyme-linked immunosorbent assays (ELISAs), immunofluorescent assays, electrochemiluminescence assays, and the like. Such assays can be used for the detection of proteins indicative of the presence or replication of MSH3 proteins.

[0297] In some aspects of the methods, the dsRNA is administered to a subject such that the dsRNA is delivered to a specific site within the subject. The reduction of expression of MSH3 can be assessed using measurements of the level or change in the level of MSH3 mRNA or MSH3 protein in a sample derived from a specific site within the subject. In some aspects, the methods include a clinically relevant reduction of expression of MSH3, e.g., as demonstrated by a clinically relevant outcome after treatment of a subject with an agent to reduce the expression of MSH3.

[0298] In other aspects, the dsRNA is administered in an amount and for a time effective to result in one of (or more, e.g., two or more, three or more, four or more of): (a) decrease the number of trinucleotide repeats, (b) decrease the level of polyglutamine, (c) decreased cell death (e.g., CNS cell death and/or muscle cell death), (d) delayed onset of the disorder, (e) increased survival of subject, and (f) increased progression free survival of a subject.

[0299] Treating nucleotide repeat expansion disorders (e.g., trinucleotide repeat expansion disorders) can result in an increase in average survival time of an individual or a population of subjects treated with the methods disclosed herein in comparison to a population of untreated subjects. For example, the survival time is of an individual or average survival time a of population is increased by more than 30 days (more than 60 days, 90 days, or 120 days). An increase in survival time of an individual or in average survival time of a population can be measured by any reproducible means. An increase in survival time of an individual can be measured, for example, by calculating for an individual the length of survival time following the initiation of treatment with the compound described herein. An increase in average survival time of a population can be measured, for example, by calculating for the average length of survival time following initiation of treatment with the compound described herein. An increase in survival time of an individual can be measured, for example, by calculating for an individual length of survival time following completion of a first round of treatment with a compound or pharmaceutically acceptable salt of a compound described herein. An increase in average survival time of a population can be measured, for example, by calculating for a population the average length of survival time following completion of a first round of treatment with a compound or pharmaceutically acceptable salt of a compound described herein.

[0300] Treating nucleotide repeat expansion disorders (e.g., trinucleotide repeat expansion disorders) can result in a decrease in the mortality rate of a population of treated subjects in comparison to an untreated population. For example, the mortality rate is decreased by more than 2% (e.g., more than 5%, 10%, or 25%). A decrease in the mortality rate of a population of treated subjects can be measured by any reproducible means, for example, by calculating for a population the average number of disease-related deaths per unit time following initiation of treatment with a compound or pharmaceutically acceptable salt of a compound described herein. A decrease in the mortality rate of a population can be measured, for example, by calculating for a population the average number of disease-related deaths per unit time following completion of a first round of treatment with a compound or pharmaceutically acceptable salt of a compound described herein.

### A. Delivery of Anti-MSH3 Agents

[0301] The delivery of a dsRNA to a cell e.g., a cell within a subject, such as a human subject e.g., a subject in need thereof, such as a subject having a nucleotide repeat expansion disorder (e.g., trinucleotide repeat expansion disorders) can be achieved in a number of different ways. For example, delivery can be performed by contacting a cell with a dsRNA either in vitro or in vivo. In vivo delivery can be performed directly by administering a composition comprising a dsRNA, e.g., a siRNA or a shRNA, to a subject. These alternatives are discussed further below.

[0302] In general, any method of delivering a nucleic acid molecule (in vitro or in vivo) can be adapted for use with a dsRNA (see e.g., Akhtar S. and Julian R L., (1992) Trends Cell. Biol. 2(5):139-144 and WO94/02595, which are incorporated herein by reference in their entireties). For in vivo delivery, factors to consider in order to deliver a dsRNA molecule include, for example, biological stability of the delivered molecule, prevention of non-specific effects, and accumulation of the delivered molecule in the target tissue. The non-specific effects of a dsRNA can be minimized by local administration, for example, by direct injection or implantation into a tissue or topically administering the preparation. Local administration to a treatment site maximizes local concentration of the agent, limits the exposure of the agent to systemic tissues that can otherwise be harmed by the agent or that can degrade the agent, and permits a lower total dose of the dsRNA molecule to be administered.

[0303] For administering a dsRNA systemically for the treatment of a disease, the dsRNA can include alternative nucleobases, alternative sugar moieties, and/or alternative internucleoside linkages, or alternatively delivered using a drug delivery system; both methods act to prevent the rapid degradation of the dsRNA by endo- and exo-nucleases in vivo. Modification of the dsRNA or the pharmaceutical carrier can permit targeting of the dsRNA composition to the target tissue and avoid undesirable off-target effects. dsRNA molecules can be modified by chemical conjugation to lipophilic groups such as cholesterol to enhance cellular uptake and prevent degradation. For example, a dsRNA directed against ApoB conjugated to a lipophilic cholesterol moiety was injected systemically into mice and resulted in knockdown of apoB mRNA in both the liver and jejunum (Soutschek, J. et al., (2004) Nature 432:173-178). Conjugation of a dsRNA to an aptamer has been shown to reduce tumor growth and mediate tumor regression in a mouse model of prostate cancer (McNamara, J O. et al., (2006) Nat. Biotechnol. 24:1005-1015). In an alternative aspect, the dsRNA can be delivered using drug delivery systems such as a nanoparticle, a lipid nanoparticle, a polyplex nanoparticle, a lipoplex nanoparticle, a dendrimer, a polymer, liposomes, or a cationic delivery system. Positively charged cationic delivery systems facilitate binding of a dsRNA molecule (negatively charged) and also enhance interactions at the negatively charged cell membrane to permit efficient uptake of a dsRNA by the cell. Cationic lipids, dendrimers, or polymers can either be bound to a dsRNA, or induced to form a vesicle or micelle (see e.g., Kim S H. et al., (2008) Journal of Controlled Release 129(2):107-116) that encases a dsRNA. The formation of vesicles or micelles further prevents degradation of the dsRNA when administered systemically. In general, any methods of delivery of nucleic acids known in the art can be adaptable to the delivery of the dsRNAs. Methods for making and administering cationic-dsRNA complexes are well within the abilities of one skilled in the art (see e.g., Sorensen, D R., et al. (2003) J. Mol. Biol 327:761-766; Verma, U N. et al., (2003) Clin. Cancer Res. 9:1291-1300; Arnold, A S et al., (2007) J. Hypertens. 25:197-205, which are incorporated herein by reference in their entirety). Some non-limiting examples of drug delivery systems useful for systemic delivery of dsRNAs include DOTAP (Sorensen, D R., et al (2003), supra; Verma, U N. et al., (2003), supra), Oligofectamine, “solid nucleic acid lipid particles” (Zimmermann, T S. et al., (2006) Nature 441:111-114), cardiolipin (Chien, P Y. et al., (2005) Cancer Gene Ther. 12:321-328; Pal, A. et al., (2005) Int J. Oncol. 26:1087-1091), polyethyleneimine (Bonnet M E. et al., (2008) Pharm. Res. August 16 Epub ahead of print; Aigner, A. (2006) J. Biomed. Biotechnol. 71659), Arg-Gly-Asp (RGD) peptides (Liu, S. (2006) Mol. Pharm. 3:472-487), and polyamidoamines (Tomalia, D A. et al., (2007) Biochem. Soc. Trans. 35:61-67; Yoo, H. et al., (1999) Pharm. Res. 16:1799-1804). In some aspects, a dsRNA forms a complex with cyclodextrin for systemic administration. Methods for administration and pharmaceutical compositions of dsRNAs and cyclodextrins can be found in U.S. Pat. No. 7,427,605, which is herein incorporated by reference in its entirety. In some aspects, the dsRNAs are delivered by polyplex or lipoplex nanoparticles. Methods for administration and pharmaceutical compositions of dsRNAs and polyplex nanoparticles and lipoplex nanoparticles can be found in U.S. Patent Application Nos. 2017/0121454; 2016/0369269; 2016/0279256; 2016/0251478; 2016/0230189; 2015/0335764; 2015/0307554; 2015/0174549; 2014/0342003; 2014/0135376; and 2013/0317086, which are herein incorporated by reference in their entirety.

i. Vector Delivery Methods

[0304] dsRNA targeting MSH3 can be expressed from transcription units inserted into DNA or RNA vectors (see, e.g., Couture, A, et al., TIG. (1996), 12:5-10; Skillern, A., et al., International PCT Publication No. WO 00/22113, Conrad, International PCT Publication No. WO 00/22114, and Conrad, U.S. Pat. No. 6,054,299). Expression can be transient (on the order of hours to weeks) or sustained (weeks to months or longer), depending upon the specific construct used and the target tissue or cell type. These transgenes can be introduced as a linear construct, a circular plasmid, or a viral vector, which can be an integrating or non-integrating vector. The transgene can be constructed to permit it to be inherited as an extrachromosomal plasmid (Gassmann, et al., (1995) Proc. Natl. Acad. Sci. USA 92:1292).

[0305] The individual strand or strands of a dsRNA can be transcribed from a promoter on an expression vector. Where two separate strands are to be expressed to generate, for example, a dsRNA, two separate expression vectors can be co-introduced (e.g., by transfection or infection) into a target cell. Alternatively, each individual strand of a dsRNA can be transcribed by promoters both of which are located on the same expression plasmid. In one aspect, a dsRNA is expressed as inverted repeat polynucleotides joined by a linker polynucleotide sequence such that the dsRNA has a stem and loop structure.

[0306] dsRNA expression vectors are generally DNA plasmids or viral vectors. Expression vectors compatible with eukaryotic cells, such as those compatible with vertebrate cells, can be used to produce recombinant constructs for the expression of a dsRNA as described herein. Eukaryotic cell expression vectors are well known in the art and are available from a number of commercial sources. Typically, such vectors are provided containing convenient restriction sites for insertion of the desired nucleic acid segment. Delivery of dsRNA expressing vectors can be systemic, such as by intravenous or intramuscular administration, by administration to target cells ex-planted from the patient followed by reintroduction into the patient, or by any other means that allows for introduction into a desired target cell.

[0307] In some aspects, the dsRNA agent that reduces the level and/or activity of MSH3 is delivered by a viral vector (e.g., a viral vector expressing an anti-MSH3 agent). Viral genomes provide a rich source of vectors that can be used for the efficient delivery of exogenous genes into a mammalian cell. Viral genomes are particularly useful vectors for gene delivery because the polynucleotides contained within such genomes are typically incorporated into the nuclear genome of a mammalian cell by generalized or specialized transduction. These processes occur as part of the natural viral replication cycle, and do not require added proteins or reagents in order to induce gene integration. Examples of viral vectors include a retrovirus (e.g., Retroviridae family viral vector), adenovirus (e.g., Ad5, Ad26, Ad34, Ad35, and Ad48), parvovirus (e.g., adeno-associated viruses), coronavirus, negative strand RNA viruses such as orthomyxovirus (e.g., influenza virus), rhabdovirus (e.g., rabies and vesicular stomatitis virus), paramyxovirus (e.g., measles and Sendai), positive strand RNA viruses, such as picornavirus and alphavirus, and double-stranded DNA viruses including adenovirus, herpesvirus (e.g., Herpes Simplex virus types 1 and 2, Epstein-Barr virus, cytomegalovirus, replication deficient herpes virus), and poxvirus (e.g., vaccinia, modified vaccinia Ankara (MVA), fowlpox and canarypox). Other viruses include Norwalk virus, togavirus, flavivirus, reoviruses, papovavirus, hepadnavirus, human papilloma virus, human foamy virus, and hepatitis virus, for example. Examples of retroviruses include: avian leukosis-sarcoma, avian C-type viruses, mammalian C-type, B-type viruses, D-type viruses, oncoretroviruses, HTLV-BLV group, lentivirus, alpharetrovirus, gammaretrovirus, spumavirus (Coffin, J. M., Retroviridae: The viruses and their replication, Virology (Third Edition) Lippincott-Raven, Philadelphia, 1996). Other examples include murine leukemia viruses, murine sarcoma viruses, mouse mammary tumor virus, bovine leukemia virus, feline leukemia virus, feline sarcoma virus, avian leukemia virus, human T cell leukemia virus, baboon endogenous virus, Gibbon ape leukemia virus, Mason Pfizer monkey virus, simian immunodeficiency virus, simian sarcoma virus, Rous sarcoma virus and lentiviruses. Other examples of vectors are described, for example, in U.S. Pat. No. 5,801,030, the vectors of which are incorporated herein by reference.

[0308] Exemplary viral vectors include lentiviral vectors, AAVs, and retroviral vectors. Lentiviral vectors and AAVs can integrate into the genome without cell divisions, and both types have been tested in pre-clinical animal studies. Methods for preparation of AAVs are described in the art e.g., in U.S. Pat. Nos. 5,677,158, 6,309,634, and 6,683,058, the methods of which is incorporated herein by reference. Methods for preparation and in vivo administration of lentiviruses are described in US 20020037281, the methods of which are incorporated herein by reference. In one aspect, a lentiviral vector is a replication-defective lentivirus particle. Such a lentivirus particle can be produced from a lentiviral vector comprising a 5′ lentiviral LTR, a tRNA binding site, a packaging signal, a promoter operably linked to a polynucleotide signal encoding the fusion protein, an origin of second strand DNA synthesis and a 3′ lentiviral LTR.

[0309] Retroviruses are most commonly used in human clinical trials, as they carry 7-8 kb, and have the ability to infect cells and have their genetic material stably integrated into the host cell with high efficiency (see, e.g., WO 95/30761; WO 95/24929, the retroviruses of which is incorporated herein by reference). In one aspect, a retroviral vector is replication defective. This prevents further generation of infectious retroviral particles in the target tissue. Thus, the replication defective virus becomes a “captive” transgene stable incorporated into the target cell genome. This is typically accomplished by deleting the gag, env, and pol genes (along with most of the rest of the viral genome). Heterologous nucleic acids are inserted in place of the deleted viral genes. The heterologous genes can be under the control of the endogenous heterologous promoter, another heterologous promoter active in the target cell, or the retroviral 5′ LTR (the viral LTR is active in diverse tissues).

[0310] These delivery vectors described herein can be made target-specific by attaching, for example, a sugar, a glycolipid, or a protein (e.g., an antibody to a target cell receptor).

[0311] Reversible delivery expression systems can be used. The Cre-loxP or FLP/FRT system and other similar systems can be used for reversible delivery-expression of one or more of the above-described nucleic acids. See WO2005/112620, WO2005/039643, US20050130919, US20030022375, US20020022018, US20030027335, and US20040216178, the systems of which are herein incorporated by reference. In particular, the reversible delivery-expression system described in US20100284990, the systems of which are herein incorporated by reference, can be used to provide a selective or emergency shut-off.

ii. Membranous Molecular Assembly Delivery Methods

[0312] dsRNAs can be delivered using a variety of membranous molecular assembly delivery methods including polymeric, biodegradable microparticle, or microcapsule delivery devices known in the art. For example, a colloidal dispersion system can be used for targeted delivery a dsRNA agent described herein. Colloidal dispersion systems include macromolecule complexes, nanocapsules, microspheres, beads, and lipid-based systems including oil-in-water emulsions, micelles, mixed micelles, and liposomes. Liposomes are artificial membrane vesicles that are useful as delivery vehicles in vitro and in vivo. It has been shown that large unilamellar vesicles (LUV), which range in size from 0.2-4.0 μm can encapsulate a substantial percentage of an aqueous buffer containing large macromolecules. Liposomes are useful for the transfer and delivery of active ingredients to the site of action. Because the liposomal membrane is structurally similar to biological membranes, when liposomes are applied to a tissue, the liposomal bilayer fuses with bilayer of the cellular membranes. As the merging of the liposome and cell progresses, the internal aqueous contents that include the dsRNA are delivered into the cell where the dsRNA can specifically bind to a target RNA and can mediate RNAi. In some cases, the liposomes are also specifically targeted, e.g., to direct the dsRNA to particular cell types. The composition of the liposome is usually a combination of phospholipids, usually in combination with steroids, especially cholesterol. Other phospholipids or other lipids can be used. The physical characteristics of liposomes depend on pH, ionic strength, and the presence of divalent cations.

[0313] A liposome containing a dsRNA can be prepared by a variety of methods. In one example, the lipid component of a liposome is dissolved in a detergent so that micelles are formed with the lipid component. For example, the lipid component can be an amphipathic cationic lipid or lipid conjugate. The detergent can have a high critical micelle concentration and can be nonionic. Exemplary detergents include cholate, CHAPS, octylglucoside, deoxycholate, and lauroyl sarcosine. The dsRNA preparation is then added to the micelles that include the lipid component. The cationic groups on the lipid interact with the dsRNA and condense around the dsRNA to form a liposome. After condensation, the detergent is removed, e.g., by dialysis, to yield a liposomal preparation of dsRNA.

[0314] If necessary, a carrier compound that assists in condensation can be added during the condensation reaction, e.g., by controlled addition. For example, the carrier compound can be a polymer other than a nucleic acid (e.g., spermine or spermidine). The pH can be adjusted to favor condensation.

[0315] Methods for producing stable polynucleotide delivery vehicles, which incorporate a polynucleotide/cationic lipid complex as a structural component of the delivery vehicle, are further described in, e.g., WO 96/37194, the entire contents of which are incorporated herein by reference. Liposome formation can include one or more aspects of exemplary methods described in Feigner, P. L. et al., (1987) Proc. Natl. Acad. Sci. USA 8:7413-7417; U.S. Pat. Nos. 4,897,355; 5,171,678; Bangham et al., (1965) M. Mol. Biol. 23:238; Olson et al., (1979) Biochim. Biophys. Acta 557:9; Szoka et al., (1978) Proc. Natl. Acad. Sci. 75: 4194; Mayhew et al., (1984) Biochim. Biophys. Acta 775:169; Kim et al., (1983) Biochim. Biophys. Acta 728:339; and Fukunaga et al., (1984) Endocrinol. 115:757. Commonly used techniques for preparing lipid aggregates of appropriate size for use as delivery vehicles include sonication and freeze-thaw plus extrusion (see, e.g., Mayer et al., (1986) Biochim. Biophys. Acta 858:161. Microfluidization can be used when consistently small (50 to 200 nm) and relatively uniform aggregates are desired (Mayhew et al., (1984) Biochim. Biophys. Acta 775:169). These methods are readily adapted to packaging dsRNA preparations into liposomes.

[0316] Liposomes fall into two broad classes. Cationic liposomes are positively charged liposomes which interact with the negatively charged nucleic acid molecules to form a stable complex. The positively charged nucleic acid/liposome complex binds to the negatively charged cell surface and is internalized in an endosome. Due to the acidic pH within the endosome, the liposomes are ruptured, releasing their contents into the cell cytoplasm (Wang et al. (1987) Biochem. Biophys. Res. Commun., 147:980-985).

[0317] Liposomes, which are pH-sensitive or negatively charged, entrap nucleic acids rather than complex with them. Since both the nucleic acid and the lipid are similarly charged, repulsion rather than complex formation occurs. Nevertheless, some nucleic acid is entrapped within the aqueous interior of these liposomes. pH sensitive liposomes have been used to deliver nucleic acids encoding the thymidine kinase gene to cell monolayers in culture. Expression of the exogenous gene was detected in the target cells (Zhou et al. (1992) Journal of Controlled Release, 19:269-274).

[0318] One major type of liposomal composition includes phospholipids other than naturally-derived phosphatidylcholine. Neutral liposome compositions, for example, can be formed from dimyristoyl phosphatidylcholine (DMPC) or dipalmitoyl phosphatidylcholine (DPPC). Anionic liposome compositions generally are formed from dimyristoyl phosphatidylglycerol, while anionic fusogenic liposomes are formed primarily from dioleoyl phosphatidylethanolamine (DOPE). Another type of liposomal composition is formed from phosphatidylcholine (PC) such as, for example, soybean PC, and egg PC. Another type is formed from mixtures of phospholipid and/or phosphatidylcholine and/or cholesterol.

[0319] Examples of other methods to introduce liposomes into cells in vitro and in vivo include U.S. Pat. Nos. 5,283,185; 5,171,678; WO 94/00569; WO 93/24640; WO 91/16024; Feigner, (1994) J. Biol. Chem. 269:2550; Nabel, (1993) Proc. Natl. Acad. Sci. 90:11307; Nabel, (1992) Human Gene Ther. 3:649; Gershon, (1993) Biochem. 32:7143; and Strauss, (1992) EMBO J. 11:417.

[0320] Non-ionic liposomal systems have also been examined to determine their utility in the delivery of drugs to the skin, in particular systems comprising non-ionic surfactant and cholesterol. Non-ionic liposomal formulations comprising NOVASOME™ I (glyceryl dilaurate/cholesterol/polyoxyethylene-10-stearyl ether) and NOVASOME™ II (glyceryl distearate/cholesterol/polyoxyethylene-10-stearyl ether) were used to deliver cyclosporin-A into the dermis of mouse skin. Results indicated that such non-ionic liposomal systems were effective in facilitating the deposition of cyclosporine A into different layers of the skin (Hu et al., (1994) S.T.P. Pharma. Sci., 4(6):466).

[0321] Liposomes can be sterically stabilized liposomes, comprising one or more specialized lipids that result in enhanced circulation lifetimes relative to liposomes lacking such specialized lipids. Examples of sterically stabilized liposomes are those in which part of the vesicle-forming lipid portion of the liposome (A) comprises one or more glycolipids, such as monosialoganglioside Gm′, or (B) is derivatized with one or more hydrophilic polymers, such as a polyethylene glycol (PEG) moiety. While not wishing to be bound by any particular theory, it is thought in the art that, at least for sterically stabilized liposomes containing gangliosides, sphingomyelin, or PEG-derivatized lipids, the enhanced circulation half-life of these sterically stabilized liposomes derives from a reduced uptake into cells of the reticuloendothelial system (RES) (Allen et al., (1987) FEBS Letters, 223:42; Wu et al., (1993) Cancer Research, 53:3765).

[0322] Various liposomes comprising one or more glycolipids are known in the art. Papahadjopoulos et al. (Ann. N.Y. Acad. Sci., (1987), 507:64) reported the ability of monosialoganglio side G^{M1}, galactocerebroside sulfate, and phosphatidylinositol to improve blood half-lives of liposomes. These findings were expounded upon by Gabizon et al. (Proc. Natl. Acad. Sci. U.S.A., (1988), 85:6949). U.S. Pat. No. 4,837,028 and WO 88/04924, both to Allen et al., disclose liposomes comprising (1) sphingomyelin and (2) the ganglioside G_{M1} or a galactocerebroside sulfate ester. U.S. Pat. No. 5,543,152 (Webb et al.) discloses liposomes comprising sphingomyelin. Liposomes comprising 1,2-sn-dimyristoylphosphatidylcholine are disclosed in WO 97/13499 (Lim et al).

[0323] In one aspect, cationic liposomes are used. Cationic liposomes possess the advantage of being able to fuse to the cell membrane. Non-cationic liposomes, although not able to fuse as efficiently with the plasma membrane, are taken up by macrophages in vivo and can be used to deliver dsRNAs to macrophages.

[0324] Further advantages of liposomes include: liposomes obtained from natural phospholipids are biocompatible and biodegradable; liposomes can incorporate a wide range of water and lipid soluble drugs; liposomes can protect encapsulated dsRNAs in their internal compartments from metabolism and degradation (Rosoff, in “Pharmaceutical Dosage Forms,” Lieberman, Rieger and Banker (Eds.), 1988, volume 1, p. 245). Important considerations in the preparation of liposome formulations are the lipid surface charge, vesicle size and the aqueous volume of the liposomes.

[0325] A positively charged synthetic cationic lipid, N-[1-(2,3-dioleyloxy)propyl]-N,N,N-trimethylammonium chloride (DOTMA) can be used to form small liposomes that interact spontaneously with nucleic acid to form lipid-nucleic acid complexes which are capable of fusing with the negatively charged lipids of the cell membranes of tissue culture cells, resulting in delivery of dsRNA (see, e.g., Feigner, P. L. et al., (1987) Proc. Natl. Acad. Sci. USA 8:7413-7417, and U.S. Pat. No. 4,897,355 for a description of DOTMA and its use with DNA).

[0326] A DOTMA analogue, 1,2-bis(oleoyloxy)-3-(trimethylammonia)propane (DOTAP) can be used in combination with a phospholipid to form DNA-complexing vesicles. LIPOFECTIN™ Bethesda Research Laboratories, Gaithersburg, Md.) is an effective agent for the delivery of highly anionic nucleic acids into living tissue culture cells that comprise positively charged DOTMA liposomes which interact spontaneously with negatively charged polynucleotides to form complexes. When enough positively charged liposomes are used, the net charge on the resulting complexes is also positive. Positively charged complexes prepared in this way spontaneously attach to negatively charged cell surfaces, fuse with the plasma membrane, and efficiently deliver functional nucleic acids into, for example, tissue culture cells. Another commercially available cationic lipid, 1,2-bis(oleoyloxy)-3,3-(trimethylammonia)propane (“DOTAP”) (Boehringer Mannheim, Indianapolis, Ind.) differs from DOTMA in that the oleoyl moieties are linked by ester, rather than ether linkages.

[0327] Other reported cationic lipid compounds include those that have been conjugated to a variety of moieties including, for example, carboxyspermine which has been conjugated to one of two types of lipids and includes compounds such as 5-carboxyspermylglycine dioctaoleoylamide (“DOGS”) (TRANSFECTAM′, Promega, Madison, Wis.) and dipalmitoylphosphatidylethanolamine 5-carboxyspermyl-amide (“DPPES”) (see, e.g., U.S. Pat. No. 5,171,678).

[0328] Another cationic lipid conjugate includes derivatization of the lipid with cholesterol (“DC-Chol”) which has been formulated into liposomes in combination with DOPE (See, Gao, X. and Huang, L., (1991) Biochim. Biophys. Res. Commun. 179:280). Lipopolylysine, made by conjugating polylysine to DOPE, has been reported to be effective for transfection in the presence of serum (Zhou, X. et al., (1991) Biochim. Biophys. Acta 1065:8). For certain cell lines, these liposomes containing conjugated cationic lipids, are said to exhibit lower toxicity and provide more efficient transfection than the DOTMA-containing compositions. Other commercially available cationic lipid products include DMRIE and DMRIE-HP (Vical, La Jolla, Calif.) and Lipofectamine (DOSPA) (Life Technology, Inc., Gaithersburg, Md.). Other cationic lipids suitable for the delivery of oligonucleotides are described in WO 98/39359 and WO 96/37194.

[0329] Liposomal formulations are particularly suited for topical administration, liposomes present several advantages over other formulations. Such advantages include reduced side effects related to high systemic absorption of the administered drug, increased accumulation of the administered drug at the desired target, and the ability to administer dsRNA into the skin. In some implementations, liposomes are used for delivering dsRNA to epidermal cells and also to enhance the penetration of dsRNA into dermal tissues, e.g., into skin. For example, the liposomes can be applied topically. Topical delivery of drugs formulated as liposomes to the skin has been documented (see, e.g., Weiner et al., (1992) Journal of Drug Targeting, vol. 2, 405-410 and du Plessis et al., (1992) Antiviral Research, 18:259-265; Mannino, R. J. and Fould-Fogerite, S., (1998) Biotechniques 6:682-690; Itani, T. et al., (1987) Gene 56:267-276; Nicolau, C. et al. (1987) Meth. Enzymol. 149:157-176; Straubinger, R. M. and Papahadjopoulos, D. (1983) Meth. Enzymol. 101:512-527; Wang, C. Y. and Huang, L., (1987) Proc. Natl. Acad. Sci. USA 84:7851-7855).

[0330] Non-ionic liposomal systems have also been examined to determine their utility in the delivery of drugs to the skin, in particular systems comprising non-ionic surfactant and cholesterol. Non-ionic liposomal formulations comprising NOVASOME I (glyceryl dilaurate/cholesterol/polyoxyethylene-10-stearyl ether) and NOVASOME II (glyceryl distearate/cholesterol/polyoxyethylene-10-stearyl ether) were used to deliver a drug into the dermis of mouse skin. Such formulations with dsRNA are useful for treating a dermatological disorder.

[0331] The targeting of liposomes is also possible based on, for example, organ-specificity, cell-specificity, and organelle-specificity and is known in the art. In the case of a liposomal targeted delivery system, lipid groups can be incorporated into the lipid bilayer of the liposome in order to maintain the targeting ligand in stable association with the liposomal bilayer. Various linking groups can be used for joining the lipid chains to the targeting ligand. Additional methods are known in the art and are described, for example in U.S. Patent Application Publication No. 20060058255, the linking groups of which are herein incorporated by reference.

[0332] Liposomes that include dsRNA can be made highly deformable. Such deformability can enable the liposomes to penetrate through pore that are smaller than the average radius of the liposome. For example, transfersomes are yet another type of liposomes, and are highly deformable lipid aggregates which are attractive candidates for drug delivery vehicles. Transfersomes can be described as lipid droplets which are so highly deformable that they are easily able to penetrate through pores which are smaller than the droplet. Transfersomes can be made by adding surface edge activators, usually surfactants, to a standard liposomal composition. Transfersomes that include dsRNA can be delivered, for example, subcutaneously by infection in order to deliver dsRNA to keratinocytes in the skin. In order to cross intact mammalian skin, lipid vesicles must pass through a series of fine pores, each with a diameter less than 50 nm, under the influence of a suitable transdermal gradient. In addition, due to the lipid properties, these transfersomes can be self-optimizing (adaptive to the shape of pores, e.g., in the skin), self-repairing, and can frequently reach their targets without fragmenting, and often self-loading. Transfersomes have been used to deliver serum albumin to the skin. The transfersome-mediated delivery of serum albumin has been shown to be as effective as subcutaneous injection of a solution containing serum albumin.

[0333] Other formulations are described in U.S. provisional application Ser. No. 61/018,616, filed Jan. 2, 2008; 61/018,611, filed Jan. 2, 2008; 61/039,748, filed Mar. 26, 2008; 61/047,087, filed Apr. 22, 2008 and 61/051,528, filed May 8, 2008. PCT application No. PCT/US2007/080331, filed Oct. 3, 2007 also describes formulations that are amenable for use in the methods described herein.

[0334] Surfactants find wide application in formulations such as emulsions (including microemulsions) and liposomes. The most common way of classifying and ranking the properties of the many different types of surfactants, both natural and synthetic, is by the use of the hydrophile/lipophile balance (HLB). The nature of the hydrophilic group (also known as the “head”) provides the most useful means for categorizing the different surfactants used in formulations (Rieger, in Pharmaceutical Dosage Forms, Marcel Dekker, Inc., New York, N.Y., 1988, p. 285).

[0335] If the surfactant molecule is not ionized, it is classified as a nonionic surfactant. Nonionic surfactants find wide application in pharmaceutical and cosmetic products and are usable over a wide range of pH values. In general, their HLB values range from 2 to about 18 depending on their structure. Nonionic surfactants include nonionic esters such as ethylene glycol esters, propylene glycol esters, glyceryl esters, polyglyceryl esters, sorbitan esters, sucrose esters, and ethoxylated esters. Nonionic alkanolamides and ethers such as fatty alcohol ethoxylates, propoxylated alcohols, and ethoxylated/propoxylated block polymers are also included in this class. The polyoxyethylene surfactants are the most popular members of the nonionic surfactant class.

[0336] If the surfactant molecule carries a negative charge when it is dissolved or dispersed in water, the surfactant is classified as anionic. Anionic surfactants include carboxylates such as soaps, acyl lactylates, acyl amides of amino acids, esters of sulfuric acid such as alkyl sulfates and ethoxylated alkyl sulfates, sulfonates such as alkyl benzene sulfonates, acyl isethionates, acyl taurates and sulfosuccinates, and phosphates. The most important members of the anionic surfactant class are the alkyl sulfates and the soaps.

[0337] If the surfactant molecule carries a positive charge when it is dissolved or dispersed in water, the surfactant is classified as cationic. Cationic surfactants include quaternary ammonium salts and ethoxylated amines. The quaternary ammonium salts are the most used members of this class.

[0338] If the surfactant molecule has the ability to carry either a positive or negative charge, the surfactant is classified as amphoteric. Amphoteric surfactants include acrylic acid derivatives, substituted alkylamides, N-alkylbetaines, and phosphatides.

[0339] The use of surfactants in drug products, formulations and in emulsions has been reviewed (Rieger, in Pharmaceutical Dosage Forms, Marcel Dekker, Inc., New York, N.Y., 1988, p. 285).

[0340] The dsRNA for use in the methods can be provided as micellar formulations. Micelles are a particular type of molecular assembly in which amphipathic molecules are arranged in a spherical structure such that all the hydrophobic portions of the molecules are directed inward, leaving the hydrophilic portions in contact with the surrounding aqueous phase. The converse arrangement exists if the environment is hydrophobic.

iii. Lipid Nanoparticle-Based Delivery Methods

[0341] dsRNAs described herein can be fully encapsulated in a lipid formulation, e.g., a lipid nanoparticle (LNP), or other nucleic acid-lipid particle. LNPs are extremely useful for systemic applications, as they exhibit extended circulation lifetimes following intravenous (i.v.) injection and accumulate at distal sites (e.g., sites physically separated from the administration site). LNPs include “pSPLP,” which include an encapsulated condensing agent-nucleic acid complex as set forth in PCT Publication No. WO 00/03683. The particles typically have a mean diameter of about 50 nm to about 150 nm, more typically about 60 nm to about 130 nm, more typically about 70 nm to about 110 nm, most typically about 70 nm to about 90 nm, and are substantially nontoxic. In addition, the nucleic acids when present in the nucleic acid-lipid particles are resistant in aqueous solution to degradation with a nuclease. Nucleic acid-lipid particles and their method of preparation are disclosed in, e.g., U.S. Pat. Nos. 5,976,567; 5,981,501; 6,534,484; 6,586,410; 6,815,432; U.S. Publication No. 2010/0324120 and PCT Publication No. WO 96/40964.

[0342] In one aspect, the lipid to drug ratio (mass/mass ratio) (e.g., lipid to dsRNA ratio) will be in the range of from about 1:1 to about 50:1, from about 1:1 to about 25:1, from about 3:1 to about 15:1, from about 4:1 to about 10:1, from about 5:1 to about 9:1, or about 6:1 to about 9:1. Ranges intermediate to the above recited ranges are also contemplated.

[0343] Non-limiting examples of cationic lipids include N,N-dioleyl-N,N-dimethylammonium chloride (DODAC), N,N-distearyl-N,N-dimethylammonium bromide (DDAB), N—(I-(2,3-dioleoyloxy)propyl)-N,N,N-trimethylammonium chloride (DOTAP), N—(I-(2,3-dioleyloxy)propyl)-N,N,N-trimethylammonium chloride (DOTMA), N,N-dimethyl-2,3-dioleyloxy)propylamine (DODMA), 1,2-DiLinoleyloxy-N,N-dimethylaminopropane (DLinDMA), 1,2-Dilinolenyloxy-N,N-dimethylaminopropane (DLenDMA), 1,2-Dilinoleylcarbamoyloxy-3-dimethylaminopropane (DLin-C-DAP), 1,2-Dilinoleyoxy-3-(dimethylamino)acetoxypropane (DLin-DAC), 1,2-Dilinoleyoxy-3-morpholinopropane (DLin-MA), 1,2-Dilinoleoyl-3-dimethylaminopropane (DLinDAP), 1,2-Dilinoleylthio-3-dimethylaminopropane (DLin-S-DMA), 1-Linoleoyl-2-linoleyloxy-3-dimethylaminopropane (DLin-2-DMAP), 1,2-Dilinoleyloxy-3-trimethylaminopropane chloride salt (DLin-TMA.Cl), 1,2-Dilinoleoyl-3-trimethylaminopropane chloride salt (DLin-TAP.Cl), 1,2-Dilinoleyloxy-3-(N-methylpiperazino)propane (DLin-MPZ), or 3-(N,N-Dilinoleylamino)-1,2-propanediol (DLinAP), 3-(N,N-Dioleylamino)-1,2-propanedio (DOAP), 1,2-Dilinoleyloxo-3-(2-N,N-dimethylamino)ethoxypropane (DLin-EG-DMA), 1,2-Dilinolenyloxy-N,N-dimethylaminopropane (DLinDMA), 2,2-Dilinoleyl-4-dimethylaminomethyl-[1,3]-dioxolane (DLin-K-DMA) or analogs thereof, (3aR,5s,6aS)-N,N-dimethyl-2,2-di((9Z,12Z)-octadeca-9,12-dienyetetrahydro-3aH-cyclopenta[d][1,3]dioxol-5-amine (ALN100), (6Z,9Z,28Z,31Z)-heptatriaconta-6,9,28,31-tetraen-19-yl4-(dimethylamino)bu-tanoate (MC3), 1,1′-(2-(4-(2-((2-(bis(2-hydroxydodecyl)amino)ethyl)(2-hydroxydodecyl)ami-no)ethyl)piperazin-1-yeethylazanediyedidodecan-2-ol (Tech G1), or a mixture thereof. The cationic lipid can comprise, for example, from about 20 mol % to about 50 mol % or about 40 mol % of the total lipid present in the particle.

[0344] The ionizable/non-cationic lipid can be an anionic lipid or a neutral lipid including, but not limited to, distearoylphosphatidylcholine (DSPC), dioleoylphosphatidylcholine (DOPC), dipalmitoylphosphatidylcholine (DPPC), dioleoylphosphatidylglycerol (DOPG), dipalmitoylphosphatidylglycerol (DPPG), dioleoyl-phosphatidylethanolamine (DOPE), palmitoyloleoylphosphatidylcholine (POPC), palmitoyloleoylphosphatidylethanolamine (POPE), dioleoyl-phosphatidylethanolamine 4-(N-maleimidomethyl)-cyclohexane-1-carboxylate (DOPE-mal), dipalmitoyl phosphatidyl ethanolamine (DPPE), dimyristoylphosphoethanolamine (DMPE), distearoyl-phosphatidyl-ethanolamine (DSPE), 16-O-monomethyl PE, 16-O-dimethyl PE, 18-1-trans PE, 1-stearoyl-2-oleoyl-phosphatidyethanolamine (SOPE), cholesterol, or a mixture thereof. The non-cationic lipid can be, for example, from about 5 mol % to about 90 mol %, about 10 mol %, or about 60 mol % if cholesterol is included, of the total lipid present in the particle.

[0345] The conjugated lipid that reduces aggregation of particles can be, for example, a polyethyleneglycol (PEG)-lipid including, without limitation, a PEG-diacylglycerol (DAG), a PEG-dialkyloxypropyl (DAA), a PEG-phospholipid, a PEG-ceramide (Cer), or a mixture thereof. The PEG-DAA conjugate can be, for example, a PEG-dilauryloxypropyl (C₁₂), a PEG-dimyristyloxypropyl (C₁₄), a PEG-dipalmityloxypropyl (C₁₆), or a PEG-distearyloxypropyl (C₁₈). The conjugated lipid that prevents aggregation of particles can be, for example, from 0 mol % to about 20 mol % or about 2 mol % of the total lipid present in the particle.

[0346] In some aspects, the nucleic acid-lipid particle further includes cholesterol at, e.g., about 10 mol % to about 60 mol % or about 50 mol % of the total lipid present in the particle.

[0347] Additional exemplary lipid-dsRNA formulations are described in Table 1 of WO 2018/195165, herein incorporated by reference.

### B. Combination Therapies

[0348] A dsRNA can be used alone or in combination with at least one additional therapeutic agent, e.g., other agents that treat nucleotide repeat expansion disorders (e.g., trinucleotide repeat expansion disorders) or symptoms associated therewith, or in combination with other types of therapies to treat trinucleotide repeat expansion disorders. In combination treatments, the dosages of one or more of the therapeutic compounds can be reduced from standard dosages when administered alone. For example, doses can be determined empirically from drug combinations and permutations or can be deduced by isobolographic analysis (e.g., Black et al., Neurology 65:S3-S6 (2005)). In this case, dosages of the compounds when combined should provide a therapeutic effect.

[0349] In some aspects, the dsRNA agents described herein can be used in combination with at least one additional therapeutic agent to treat a nucleotide repeat expansion disorder (e.g., trinucleotide repeat expansion disorders) associated with gene having a trinucleotide repeat (e.g., any of the trinucleotide repeat expansion disorders and associated genes having a trinucleotide repeat listed in Table 1). In some aspects, at least one additional therapeutic agent can be an oligonucleotide (e.g., an ASO) that hybridizes with the mRNA of gene associated with a trinucleotide repeat expansion disorder (e.g., any of the genes listed in Table 1). In some aspects, the inucleotide repeat expansion disorder (e.g., trinucleotide repeat expansion disorders) is Huntington's disease (HD). In some aspects, the gene associated with a nucleotide repeat expansion disorder (e.g., trinucleotide repeat expansion disorders) is Huntingtin (HTT). Several allelic variants of the Huntingtin gene have been implicated in the etiology of Huntington's disease. In some cases, these variants are identified on the basis of having unique HD-associated single nucleotide polymorphisms (SNPs). In some aspects, the other oligonucleotide (e.g., an ASO) hybridizes to an mRNA of the Huntingtin gene containing any of the HD-associated SNPs known in the art (e.g., any of the HD-associated SNPs described in Skotte et al., PLoS One 2014, 9(9): e107434, Carroll et al., Mol. Ther. 2011, 19(12): 2178-85, Warby et al., Am. Hum. Gen. 2009, 84(3): 351-66 (herein incorporated by reference)). In some aspects, the other oligonucleotide (e.g., an ASO) hybridizes to an mRNA of the Huntingtin gene lacking any of the HD-associated SNPs. In some of the aspects, the other oligonucleotide (e.g., an ASO) hybridizes to an mRNA of the Huntingtin gene having any of the SNPs selected from the group of rs362307 and rs365331. In some aspects, the other oligonucleotide (e.g., an ASO) can be a modified oligonucleotide (e.g., an oligonucleotide including any of the modifications described herein). In some aspects, the modified oligonucleotides comprise one or more phosphorothioate internucleoside linkages. In some aspects, the modified oligonucleotide comprises one or more 2′-MOE moieties. In some aspects, the other oligonucleotide (e.g., an ASO) that hybridizes to the mRNA of the Huntingtin gene has a sequence selected from the SEQ ID NOs. 6-285 of U.S. Pat. No. 9,006,198; SEQ ID NOs. 6-8 of US Patent Application Publication No. 2017/0044539; SEQ ID NOs. 1-1565 of US Patent Application Publication 2018/0216108; and SEQ ID NOs. 1-2432 of PCT Publication WO 2017/192679, the sequences of which are hereby incorporated by reference.

[0350] In some aspects, at least one additional therapeutic agent is a chemotherapeutic agent (e.g., a cytotoxic agent or other chemical compound useful in the treatment of a trinucleotide repeat expansion disorder). In some aspects, at least one additional therapeutic agent can be a therapeutic agent which is a non-drug treatment. For example, at least one therapeutic agent can be physical therapy.

[0351] In any of the combination aspects described herein, the two or more therapeutic agents are administered simultaneously or sequentially, in either order. For example, a first therapeutic agent can be administered immediately, up to 1 hour, up to 2 hours, up to 3 hours, up to 4 hours, up to 5 hours, up to 6 hours, up to 7 hours, up to, 8 hours, up to 9 hours, up to 10 hours, up to 11 hours, up to 12 hours, up to 13 hours, 14 hours, up to hours 16, up to 17 hours, up 18 hours, up to 19 hours up to 20 hours, up to 21 hours, up to 22 hours, up to 23 hours up to 24 hours or up to 1-7, 1-14, 1-21 or 1-30 days before or after one of more of the additional therapeutic agents.

### V. Pharmaceutical Compositions

[0352] The dsRNAs described herein can be formulated into pharmaceutical compositions for administration to human subjects in a biologically compatible form suitable for administration in vivo.

[0353] The compounds described herein can be used in the form of the free base, in the form of salts, solvates, and as prodrugs. All forms are within the methods described herein. In accordance with the methods, the dsRNAs or salts, solvates, or prodrugs thereof can be administered to a patient in a variety of forms depending on the selected route of administration, as will be understood by those skilled in the art. The compounds described herein can be administered, for example, by oral, parenteral, intrathecal, intracerebroventricular, intraparenchymal, buccal, sublingual, nasal, rectal, patch, pump, or transdermal administration and the pharmaceutical compositions formulated accordingly. Parenteral administration includes intravenous, intraperitoneal, subcutaneous, intramuscular, transepithelial, nasal, intrapulmonary, intrathecal, intracerebroventricular, intraparenchymal, rectal, and topical modes of administration. Parenteral administration can be by continuous infusion over a selected period of time.

[0354] A compound described herein can be orally administered, for example, with an inert diluent or with an assimilable edible carrier, or it can be enclosed in hard or soft shell gelatin capsules, or it can be compressed into tablets, or it can be incorporated directly with the food of the diet. For oral therapeutic administration, a compound described herein can be incorporated with an excipient and used in the form of ingestible tablets, buccal tablets, troches, capsules, elixirs, suspensions, syrups, and wafers. A compound described herein can be administered parenterally. Solutions of a compound described herein can be prepared in water suitably mixed with a surfactant, such as hydroxypropylcellulose. Dispersions can be prepared in glycerol, liquid polyethylene glycols, DMSO, and mixtures thereof with or without alcohol, and in oils. Under ordinary conditions of storage and use, these preparations can contain a preservative to prevent the growth of microorganisms. Conventional procedures and ingredients for the selection and preparation of suitable formulations are described, for example, in Remington's Pharmaceutical Sciences (2012, 22nd ed.) and in The United States Pharmacopeia: The National Formulary (USP 41 NF 36), published in 2018. The pharmaceutical forms suitable for injectable use include sterile aqueous solutions or dispersions and sterile powders for the extemporaneous preparation of sterile injectable solutions or dispersions. In all cases the form must be sterile and must be fluid to the extent that can be easily administered via syringe. Compositions for nasal administration can conveniently be formulated as aerosols, drops, gels, and powders. Aerosol formulations typically include a solution or fine suspension of the active substance in a physiologically acceptable aqueous or non-aqueous solvent and are usually presented in single or multidose quantities in sterile form in a sealed container, which can take the form of a cartridge or refill for use with an atomizing device. Alternatively, the sealed container can be a unitary dispensing device, such as a single dose nasal inhaler or an aerosol dispenser fitted with a metering valve which is intended for disposal after use. Where the dosage form includes an aerosol dispenser, it will contain a propellant, which can be a compressed gas, such as compressed air or an organic propellant, such as fluorochlorohydrocarbon. The aerosol dosage forms can take the form of a pump-atomizer. Compositions suitable for buccal or sublingual administration include tablets, lozenges, and pastilles, where the active ingredient is formulated with a carrier, such as sugar, acacia, tragacanth, gelatin, and glycerine. Compositions for rectal administration are conveniently in the form of suppositories containing a conventional suppository base, such as cocoa butter

[0355] The compounds described herein can be administered to an animal, e.g., a human, alone or in combination with pharmaceutically acceptable carriers, as noted herein, the proportion of which is determined by the solubility and chemical nature of the compound, chosen route of administration, and standard pharmaceutical practice.

### VI. Dosages

[0356] The dosage of the compositions (e.g., a composition including a dsRNA) described herein, can vary depending on many factors, such as the pharmacodynamic properties of the compound; the mode of administration; the age, health, and weight of the recipient; the nature and extent of the symptoms; the frequency of the treatment, and the type of concurrent treatment, if any; and the clearance rate of the compound in the animal to be treated. The compositions described herein can be administered initially in a suitable dosage that can be adjusted as required, depending on the clinical response. In some aspects, the dosage of a composition (e.g., a composition including a dsRNA) is a prophylactically or a therapeutically effective amount.

### VII. Kits

[0357] Kits including (a) a pharmaceutical composition including a dsRNA agent that reduces the level and/or activity of MSH3 in a cell or subject described herein, and (b) a package insert with instructions to perform any of the methods described herein are also contemplated. In some aspects, the kit includes (a) a pharmaceutical composition including a dsRNA agent that reduces the level and/or activity of MSH3 in a cell or subject described herein, (b) an additional therapeutic agent, and (c) a package insert with instructions to perform any of the methods described herein.

### EXAMPLES

### Example 1. Design and Selection of dsRNA Agents

### Identification and Selection of Target Transcript

[0358] Target transcript selection and off-target scoring (below) utilized NCBI RefSeq sequences, downloaded from NCBI 21 Nov. 2018. Experimentally validated “NM” transcript models were used except for cynomolgus monkey, which only has “XM” predicted models for the large majority of genes. The longest human, mouse, rat, and cynomolgus monkey MSH3 transcript that contained all mapped internal exons was selected (SEQ IDs 1, 3, 4, and 5 for human, mouse, rat, and cynomolgus monkey, respectively; SEQ ID NO:2 is the protein sequence).

TABLE 2
Exemplary Human, Cyno, Mouse, and Rat MSH3 Transcripts

| Human (SEQ | Cyno (SEQ | Mouse (SEQ | Rat (SEQ |
|---|---|---|---|
| ID NO: 1) | ID NO: 3) | ID NO: 4) | ID NO: 5) |
| NM_002439.4 | XM_005557283.2 | NM_010829.2 | NM_001191957.1 |

### Selection of 19Mer Oligonucleotide Sequences

[0359] All sense 18mer sub-sequences and complementary antisense sequences per transcript were generated. An A nucleotide was added to the 3′ end of the sense strand, with a complementary U at the 5′ end of the antisense strand, to yield a 19mer duplex. This nucleotide pair was chosen because the antisense (“guide”) strand's first (5′) nucleotide is not exposed and does not bind to target mRNAs when loaded in the RISC complex, and the core AGO protein subunit shows preference for 5′ U nucleotides (Noland and Doudna (2013), RNA, 19: 639-648, Nakanishi (2016), WIREs RNA, 7: 637-660). Candidate 19mer duplexes were selected that met the following thermodynamic and physical characteristics: predicted melting temperature of <60° C., no homopolymers of 5 or longer, and at least 4 U or A nucleotides in the seed region (antisense strand positions 2-9). These selected duplexes were further evaluated for specificity (off-target scoring, below).

[0360] The specificity of the selected duplexes was evaluated via alignment of both strands to all unspliced RefSeq transcripts (“NM” models for human, mouse, and rat; “NM” and “XM” models for cynomolgus monkey), using the FASTA algorithm with an E value cutoff of 1000. Duplexes were selected with at least one 8mer seed (positions 2-9) mismatch on each strand to any transcript other than those encoded by the MSH3 gene, since seed mismatches govern specificity of dsRNA activity (Boudreau et al., (2011), Mol. Therapy 19: 2169-2177).

[0361] The sequences, positions in human transcript, and conservation in other species of each duplex are given in Table 3. In Table 3 below, the 5′ U of the antisense oligonucleotide can be any nucleotide (e.g., U, A, G, C, T). In some aspects, the 5′ U of the antisense oligonucleotide in Table 3 is U. Each sense and antisense oligonucleotides in Table 3 include a dTdT overhang on the 3′ end.

[0362] Additionally, every A and G in each sense oligonucleotide in Table 3 is a ribonucleotide. Every C and U in each sense oligonucleotide is a 2′-O-Methyl ribonucleotide.

[0363] Also, every A and G in each antisense oligonucleotide in Table 3 is a ribonucleotide. Every C and U preceding an A in the antisense oligonucleotide is a 2′-O-Methyl ribonucleotide, with one exception: U is the first nucleotide of the antisense strand, and it is a ribonucleotide.

[0364] Each nucleotide in the sense and antisense oligonucleotide in Table 3 is linked by a phosphate.

[0365] Furthermore, duplexes with sequence conservation in cynologous monkey, mouse, and rat are provided in Tables 4-10.

TABLE 3
Exemplary dsRNAs

| SEQ | | | | | | | |
|---|---|---|---|---|---|---|---|
| ID | | | | | | | |
| NO/ | | | SEQ ID NO/ | | | | |
| Sense | | | Antisense | | | | |
| Oligo | | | Oligo | | | | |
| NO | Sense | Antisense | NO | Pos | Cyno | Mouse | Rat |
| 6 | CCGCCGCACAUAGCUACAA | UUGUAGCUAUGUGCGGCGG | 7 | 306 | No | No | No |
| 8 | CGCCGCACAUAGCUACAGA | UCUGUAGCUAUGUGCGGCG | 9 | 307 | No | No | No |
| 10 | GCCGCACAUAGCUACAGAA | UUCUGUAGCUAUGUGCGGC | 11 | 308 | No | No | No |
| 12 | CGCACAUAGCUACAGAAAA | UUUUCUGUAGCUAUGUGCG | 13 | 310 | No | No | No |
| 14 | GCACAUAGCUACAGAAAUA | UAUUUCUGUAGCUAUGUGC | 15 | 311 | No | No | No |
| 16 | CACAUAGCUACAGAAAUUA | UAAUUUCUGUAGCUAUGUG | 17 | 312 | No | No | No |
| 18 | AUAGCUACAGAAAUUGACA | UGUCAAUUUCUGUAGCUAU | 19 | 315 | No | No | No |
| 20 | GCUACAGAAAUUGACAGAA | UUCUGUCAAUUUCUGUAGC | 21 | 318 | No | No | No |
| 22 | UUGACAGAAGAAAGAAGAA | UUCUUCUUUCUUCUGUCAA | 23 | 328 | No | No | No |
| 24 | CAGAAGAAAGAAGAGACCA | UGGUCUCUUCUUUCUUCUG | 25 | 332 | No | No | No |
| 26 | AGAAGAAAGAAGAGACCAA | UUGGUCUCUUCUUUCUUCU | 27 | 333 | No | No | No |
| 28 | AGAAAGAAGAGACCAUUGA | UCAAUGGUCUCUUCUUUCU | 29 | 336 | No | No | No |
| 30 | GAGACCAUUGGAAAAUGAA | UUCAUUUUCCAAUGGUCUC | 31 | 344 | Yes | No | No |
| 32 | CCAUUGGAAAAUGAUGGGA | UCCCAUCAUUUUCCAAUGG | 33 | 348 | Yes | No | No |
| 34 | AAAAUGAUGGGCCUGUUAA | UUAACAGGCCCAUCAUUUU | 35 | 355 | Yes | No | No |
| 36 | AGAAAGUAAAGAAAGUCCA | UGGACUUUCUUUACUUUCU | 37 | 376 | No | No | No |
| 38 | GAAAGUAAAGAAAGUCCAA | UUGGACUUUCUUUACUUUC | 39 | 377 | No | No | No |
| 40 | AAGUAAAGAAAGUCCAACA | UGUUGGACUUUCUUUACUU | 41 | 379 | No | No | No |
| 42 | AGUAAAGAAAGUCCAACAA | UUGUUGGACUUUCUUUACU | 43 | 380 | No | No | No |
| 44 | GUAAAGAAAGUCCAACAAA | UUUGUUGGACUUUCUUUAC | 45 | 381 | No | No | No |
| 46 | UAAAGAAAGUCCAACAAAA | UUUUGUUGGACUUUCUUUA | 47 | 382 | No | No | No |
| 48 | AGAAAGUCCAACAAAAGGA | UCCUUUUGUUGGACUUUCU | 49 | 385 | No | No | No |
| 50 | GAAAGUCCAACAAAAGGAA | UUCCUUUUGUUGGACUUUC | 51 | 386 | No | No | No |
| 52 | AAAGUCCAACAAAAGGAAA | UUUCCUUUUGUUGGACUUU | 53 | 387 | No | No | No |
| 54 | AGUCCAACAAAAGGAAGGA | UCCUUCCUUUUGUUGGACU | 55 | 389 | No | No | No |
| 56 | AAGGAAGGAGGAAGUGAUA | UAUCACUUCCUCCUUCCUU | 57 | 399 | Yes | No | No |
| 58 | AGGAAGUGAUCUGGGAAUA | UAUUCCCAGAUCACUUCCU | 59 | 407 | Yes | No | No |
| 60 | AGUGAUCUGGGAAUGUCUA | UAGACAUUCCCAGAUCACU | 61 | 411 | Yes | No | No |
| 62 | UCUGGGAAUGUCUGGCAAA | UUUGCCAGACAUUCCCAGA | 63 | 416 | Yes | No | No |
| 64 | UGGGAAUGUCUGGCAACUA | UAGUUGCCAGACAUUCCCA | 65 | 418 | Yes | No | No |
| 66 | GAAUGUCUGGCAACUCUGA | UCAGAGUUGCCAGACAUUC | 67 | 421 | Yes | No | No |
| 68 | AAUGUCUGGCAACUCUGAA | UUCAGAGUUGCCAGACAUU | 69 | 422 | Yes | No | No |
| 70 | AUGUCUGGCAACUCUGAGA | UCUCAGAGUUGCCAGACAU | 71 | 423 | Yes | No | No |
| 72 | UGGCAACUCUGAGCCAAAA | UUUUGGCUCAGAGUUGCCA | 73 | 428 | Yes | No | No |
| 74 | GGCAACUCUGAGCCAAAGA | UCUUUGGCUCAGAGUUGCC | 75 | 429 | Yes | No | No |
| 76 | CAACUCUGAGCCAAAGAAA | UUUCUUUGGCUCAGAGUUG | 77 | 431 | Yes | No | No |
| 78 | ACUCUGAGCCAAAGAAAUA | UAUUUCUUUGGCUCAGAGU | 79 | 433 | Yes | No | No |
| 80 | UCUGAGCCAAAGAAAUGUA | UACAUUUCUUUGGCUCAGA | 81 | 435 | Yes | No | No |
| 82 | UGAGCCAAAGAAAUGUCUA | UAGACAUUUCUUUGGCUCA | 83 | 437 | Yes | No | Yes |
| 84 | GUCUGAGGACCAGGAAUGA | UCAUUCCUGGUCCUCAGAC | 85 | 451 | Yes | No | No |
| 86 | UCUGAGGACCAGGAAUGUA | UACAUUCCUGGUCCUCAGA | 87 | 452 | Yes | No | No |
| 88 | GAGGACCAGGAAUGUUUCA | UGAAACAUUCCUGGUCCUC | 89 | 455 | No | No | No |
| 90 | AGGACCAGGAAUGUUUCAA | UUGAAACAUUCCUGGUCCU | 91 | 456 | No | No | No |
| 92 | GGACCAGGAAUGUUUCAAA | UUUGAAACAUUCCUGGUCC | 93 | 457 | No | No | No |
| 94 | ACCAGGAAUGUUUCAAAGA | UCUUUGAAACAUUCCUGGU | 95 | 459 | No | No | No |
| 96 | GGAAUGUUUCAAAGUCUCA | UGAGACUUUGAAACAUUCC | 97 | 463 | No | No | No |
| 98 | UGUUUCAAAGUCUCUGGAA | UUCCAGAGACUUUGAAACA | 99 | 467 | No | No | No |
| 100 | AAUUCUGCUGCGAUUCUGA | UCAGAAUCGCAGCAGAAUU | 101 | 496 | No | No | No |
| 102 | GAUUCUGCCCUUCCUCAAA | UUUGAGGAAGGGCAGAAUC | 103 | 507 | Yes | No | No |
| 104 | CUGCCCUUCCUCAAAGUAA | UUACUUUGAGGAAGGGCAG | 105 | 511 | Yes | No | No |
| 106 | UGCCCUUCCUCAAAGUAGA | UCUACUUUGAGGAAGGGCA | 107 | 512 | Yes | No | No |
| 108 | CCCUUCCUCAAAGUAGAGA | UCUCUACUUUGAGGAAGGG | 109 | 514 | Yes | No | No |
| 110 | CCUUCCUCAAAGUAGAGUA | UACUCUACUUUGAGGAAGG | 111 | 515 | Yes | No | No |
| 112 | CUUCCUCAAAGUAGAGUCA | UGACUCUACUUUGAGGAAG | 113 | 516 | Yes | No | No |
| 114 | UUCCUCAAAGUAGAGUCCA | UGGACUCUACUUUGAGGAA | 115 | 517 | Yes | No | No |
| 116 | CUCAAAGUAGAGUCCAGAA | UUCUGGACUCUACUUUGAG | 117 | 520 | Yes | No | No |
| 118 | AAGUAGAGUCCAGACAGAA | UUCUGUCUGGACUCUACUU | 119 | 524 | Yes | No | No |
| 120 | AGUAGAGUCCAGACAGAAA | UUUCUGUCUGGACUCUACU | 121 | 525 | Yes | No | No |
| 122 | AGAGUCCAGACAGAAUCUA | UAGAUUCUGUCUGGACUCU | 123 | 528 | Yes | No | No |
| 124 | GAGUCCAGACAGAAUCUCA | UGAGAUUCUGUCUGGACUC | 125 | 529 | Yes | No | No |
| 126 | GUCCAGACAGAAUCUCUGA | UCAGAGAUUCUGUCUGGAC | 127 | 531 | Yes | No | No |
| 128 | UCCAGACAGAAUCUCUGCA | UGCAGAGAUUCUGUCUGGA | 129 | 532 | Yes | No | No |
| 130 | UCUCUGCAGGAGAGAUUUA | UAAAUCUCUCCUGCAGAGA | 131 | 543 | Yes | No | No |
| 132 | GCAGGAGAGAUUUGCAGUA | UACUGCAAAUCUCUCCUGC | 133 | 548 | Yes | No | No |
| 134 | CAGGAGAGAUUUGCAGUUA | UAACUGCAAAUCUCUCCUG | 135 | 549 | Yes | No | No |
| 136 | GAGAGAUUUGCAGUUCUGA | UCAGAACUGCAAAUCUCUC | 137 | 552 | Yes | No | No |
| 138 | AGAGAUUUGCAGUUCUGCA | UGCAGAACUGCAAAUCUCU | 139 | 553 | Yes | No | No |
| 140 | AGAUUUGCAGUUCUGCCAA | UUGGCAGAACUGCAAAUCU | 141 | 555 | Yes | No | No |
| 142 | GAUUUGCAGUUCUGCCAAA | UUUGGCAGAACUGCAAAUC | 143 | 556 | Yes | No | No |
| 144 | AUUUGCAGUUCUGCCAAAA | UUUUGGCAGAACUGCAAAU | 145 | 557 | Yes | No | No |
| 146 | UUGCAGUUCUGCCAAAAUA | UAUUUUGGCAGAACUGCAA | 147 | 559 | Yes | No | No |
| 148 | AGUUCUGCCAAAAUGUACA | UGUACAUUUUGGCAGAACU | 149 | 563 | Yes | No | No |
| 150 | GUUCUGCCAAAAUGUACUA | UAGUACAUUUUGGCAGAAC | 151 | 564 | Yes | No | No |
| 152 | UUCUGCCAAAAUGUACUGA | UCAGUACAUUUUGGCAGAA | 153 | 565 | Yes | No | No |
| 154 | CUGCCAAAAUGUACUGAUA | UAUCAGUACAUUUUGGCAG | 155 | 567 | Yes | No | No |
| 156 | GCCAAAAUGUACUGAUUUA | UAAAUCAGUACAUUUUGGC | 157 | 569 | Yes | No | No |
| 158 | GUACUGAUUUUGAUGAUAA | UUAUCAUCAAAAUCAGUAC | 159 | 577 | Yes | No | No |
| 160 | ACUGAUUUUGAUGAUAUCA | UGAUAUCAUCAAAAUCAGU | 161 | 579 | Yes | No | No |
| 162 | UGAUGAUAUCAGUCUUCUA | UAGAAGACUGAUAUCAUCA | 163 | 587 | Yes | No | No |
| 164 | AUGAUAUCAGUCUUCUACA | UGUAGAAGACUGAUAUCAU | 165 | 589 | Yes | No | No |
| 166 | UGAUAUCAGUCUUCUACAA | UUGUAGAAGACUGAUAUCA | 167 | 590 | No | No | No |
| 168 | AUAUCAGUCUUCUACACGA | UCGUGUAGAAGACUGAUAU | 169 | 592 | No | No | No |
| 170 | UCAGUCUUCUACACGCAAA | UUUGCGUGUAGAAGACUGA | 171 | 595 | No | No | No |
| 172 | CAGUCUUCUACACGCAAAA | UUUUGCGUGUAGAAGACUG | 173 | 596 | No | No | No |
| 174 | AGUCUUCUACACGCAAAGA | UCUUUGCGUGUAGAAGACU | 175 | 597 | No | No | No |
| 176 | UCUUCUACACGCAAAGAAA | UUUCUUUGCGUGUAGAAGA | 177 | 599 | No | No | No |
| 178 | CUUCUACACGCAAAGAAUA | UAUUCUUUGCGUGUAGAAG | 179 | 600 | No | No | No |
| 180 | UUCUACACGCAAAGAAUGA | UCAUUCUUUGCGUGUAGAA | 181 | 601 | No | No | No |
| 182 | UCUACACGCAAAGAAUGCA | UGCAUUCUUUGCGUGUAGA | 183 | 602 | No | No | No |
| 184 | CUACACGCAAAGAAUGCAA | UUGCAUUCUUUGCGUGUAG | 185 | 603 | No | No | No |
| 186 | ACACGCAAAGAAUGCAGUA | UACUGCAUUCUUUGCGUGU | 187 | 605 | No | No | No |
| 188 | CACGCAAAGAAUGCAGUUA | UAACUGCAUUCUUUGCGUG | 189 | 606 | No | No | No |
| 190 | AAGAAUGCAGUUUCUUCUA | UAGAAGAAACUGCAUUCUU | 191 | 612 | Yes | No | No |
| 192 | AGUUUCUUCUGAAGAUUCA | UGAAUCUUCAGAAGAAACU | 193 | 620 | Yes | No | No |
| 194 | UCUGAAGAUUCGAAACGUA | UACGUUUCGAAUCUUCAGA | 195 | 627 | No | No | No |
| 196 | UGAAGAUUCGAAACGUCAA | UUGACGUUUCGAAUCUUCA | 197 | 629 | No | No | No |
| 198 | GAAGAUUCGAAACGUCAAA | UUUGACGUUUCGAAUCUUC | 199 | 630 | No | No | No |
| 200 | AAGAUUCGAAACGUCAAAA | UUUUGACGUUUCGAAUCUU | 201 | 631 | No | No | No |
| 202 | AGAUUCGAAACGUCAAAUA | UAUUUGACGUUUCGAAUCU | 203 | 632 | No | No | No |
| 204 | GAUUCGAAACGUCAAAUUA | UAAUUUGACGUUUCGAAUC | 205 | 633 | No | No | No |
| 206 | UUCGAAACGUCAAAUUAAA | UUUAAUUUGACGUUUCGAA | 207 | 635 | No | No | No |
| 208 | GAAACGUCAAAUUAAUCAA | UUGAUUAAUUUGACGUUUC | 209 | 638 | No | No | No |
| 210 | AAACGUCAAAUUAAUCAAA | UUUGAUUAAUUUGACGUUU | 211 | 639 | No | No | No |
| 212 | AACGUCAAAUUAAUCAAAA | UUUUGAUUAAUUUGACGUU | 213 | 640 | No | No | No |
| 214 | CGUCAAAUUAAUCAAAAGA | UCUUUUGAUUAAUUUGACG | 215 | 642 | No | No | No |
| 216 | GUCAAAUUAAUCAAAAGGA | UCCUUUUGAUUAAUUUGAC | 217 | 643 | No | No | No |
| 218 | UUAAUCAAAAGGACACAAA | UUUGUGUCCUUUUGAUUAA | 219 | 649 | No | No | No |
| 220 | UAAUCAAAAGGACACAACA | UGUUGUGUCCUUUUGAUUA | 221 | 650 | No | No | No |
| 222 | CAAAAGGACACAACACUUA | UAAGUGUUGUGUCCUUUUG | 223 | 654 | No | No | No |
| 224 | AAAGGACACAACACUUUUA | UAAAAGUGUUGUGUCCUUU | 225 | 656 | No | No | No |
| 226 | UUUUGAUCUCAGUCAGUUA | UAACUGACUGAGAUCAAAA | 227 | 671 | No | No | No |
| 228 | UGAUCUCAGUCAGUUUGGA | UCCAAACUGACUGAGAUCA | 229 | 674 | No | No | No |
| 230 | AUCUCAGUCAGUUUGGAUA | UAUCCAAACUGACUGAGAU | 231 | 676 | No | No | No |
| 232 | CUCAGUCAGUUUGGAUCAA | UUGAUCCAAACUGACUGAG | 233 | 678 | No | No | No |
| 234 | UCAGUCAGUUUGGAUCAUA | UAUGAUCCAAACUGACUGA | 235 | 679 | Yes | No | No |
| 236 | CAGUCAGUUUGGAUCAUCA | UGAUGAUCCAAACUGACUG | 237 | 680 | Yes | No | No |
| 238 | AGUCAGUUUGGAUCAUCAA | UUGAUGAUCCAAACUGACU | 239 | 681 | Yes | No | No |
| 240 | CAGUUUGGAUCAUCAAAUA | UAUUUGAUGAUCCAAACUG | 241 | 684 | Yes | No | No |
| 242 | AGUUUGGAUCAUCAAAUAA | UUAUUUGAUGAUCCAAACU | 243 | 685 | Yes | No | No |
| 244 | GUUUGGAUCAUCAAAUACA | UGUAUUUGAUGAUCCAAAC | 245 | 686 | Yes | No | No |
| 246 | UUUGGAUCAUCAAAUACAA | UUGUAUUUGAUGAUCCAAA | 247 | 687 | Yes | No | No |
| 248 | UUGGAUCAUCAAAUACAAA | UUUGUAUUUGAUGAUCCAA | 249 | 688 | Yes | No | No |
| 250 | UGGAUCAUCAAAUACAAGA | UCUUGUAUUUGAUGAUCCA | 251 | 689 | Yes | No | No |
| 252 | GGAUCAUCAAAUACAAGUA | UACUUGUAUUUGAUGAUCC | 253 | 690 | Yes | No | No |
| 254 | CAUCAAAUACAAGUCAUGA | UCAUGACUUGUAUUUGAUG | 255 | 694 | Yes | No | No |
| 256 | UCAAAUACAAGUCAUGAAA | UUUCAUGACUUGUAUUUGA | 257 | 696 | Yes | No | No |
| 258 | AUACAAGUCAUGAAAAUUA | UAAUUUUCAUGACUUGUAU | 259 | 700 | Yes | No | No |
| 260 | UACAAGUCAUGAAAAUUUA | UAAAUUUUCAUGACUUGUA | 261 | 701 | Yes | No | No |
| 262 | UACAGAAAACUGCUUCCAA | UUGGAAGCAGUUUUCUGUA | 263 | 718 | No | No | No |
| 264 | AAAACUGCUUCCAAAUCAA | UUGAUUUGGAAGCAGUUUU | 265 | 723 | No | No | No |
| 266 | AACUGCUUCCAAAUCAGCA | UGCUGAUUUGGAAGCAGUU | 267 | 725 | No | No | No |
| 268 | ACUGCUUCCAAAUCAGCUA | UAGCUGAUUUGGAAGCAGU | 269 | 726 | No | No | No |
| 270 | CUGCUUCCAAAUCAGCUAA | UUAGCUGAUUUGGAAGCAG | 271 | 727 | No | No | No |
| 272 | GCUUCCAAAUCAGCUAACA | UGUUAGCUGAUUUGGAAGC | 273 | 729 | No | No | No |
| 274 | CUUCCAAAUCAGCUAACAA | UUGUUAGCUGAUUUGGAAG | 275 | 730 | No | No | No |
| 276 | CCAAAUCAGCUAACAAACA | UGUUUGUUAGCUGAUUUGG | 277 | 733 | No | No | No |
| 278 | AAAUCAGCUAACAAACGGA | UCCGUUUGUUAGCUGAUUU | 279 | 735 | No | No | No |
| 280 | AAUCAGCUAACAAACGGUA | UACCGUUUGUUAGCUGAUU | 281 | 736 | No | No | No |
| 282 | GCUAACAAACGGUCCAAAA | UUUUGGACCGUUUGUUAGC | 283 | 741 | No | No | No |
| 284 | UAACAAACGGUCCAAAAGA | UCUUUUGGACCGUUUGUUA | 285 | 743 | No | No | No |
| 286 | AACAAACGGUCCAAAAGCA | UGCUUUUGGACCGUUUGUU | 287 | 744 | No | No | No |
| 288 | AAACGGUCCAAAAGCAUCA | UGAUGCUUUUGGACCGUUU | 289 | 747 | No | No | No |
| 290 | AACGGUCCAAAAGCAUCUA | UAGAUGCUUUUGGACCGUU | 291 | 748 | No | No | No |
| 292 | CGGUCCAAAAGCAUCUAUA | UAUAGAUGCUUUUGGACCG | 293 | 750 | No | No | No |
| 294 | UCCAAAAGCAUCUAUACGA | UCGUAUAGAUGCUUUUGGA | 295 | 753 | No | No | No |
| 296 | CCAAAAGCAUCUAUACGCA | UGCGUAUAGAUGCUUUUGG | 297 | 754 | No | No | No |
| 298 | AUCUAUACGCCGCUAGAAA | UUUCUAGCGGCGUAUAGAU | 299 | 762 | No | No | No |
| 300 | CUAUACGCCGCUAGAAUUA | UAAUUCUAGCGGCGUAUAG | 301 | 764 | No | No | No |
| 302 | UAUACGCCGCUAGAAUUAA | UUAAUUCUAGCGGCGUAUA | 303 | 765 | Yes | No | No |
| 304 | AUACGCCGCUAGAAUUACA | UGUAAUUCUAGCGGCGUAU | 305 | 766 | Yes | No | No |
| 306 | ACGCCGCUAGAAUUACAAA | UUUGUAAUUCUAGCGGCGU | 307 | 768 | Yes | No | No |
| 308 | CCGCUAGAAUUACAAUACA | UGUAUUGUAAUUCUAGCGG | 309 | 771 | Yes | No | No |
| 310 | CGCUAGAAUUACAAUACAA | UUGUAUUGUAAUUCUAGCG | 311 | 772 | Yes | No | No |
| 312 | UAGAAUUACAAUACAUAGA | UCUAUGUAUUGUAAUUCUA | 313 | 775 | Yes | No | No |
| 314 | AGAAUUACAAUACAUAGAA | UUCUAUGUAUUGUAAUUCU | 315 | 776 | Yes | No | No |
| 316 | GAAUUACAAUACAUAGAAA | UUUCUAUGUAUUGUAAUUC | 317 | 777 | Yes | No | No |
| 318 | AAUUACAAUACAUAGAAAA | UUUUCUAUGUAUUGUAAUU | 319 | 778 | Yes | No | No |
| 320 | AUACAUAGAAAUGAAGCAA | UUGCUUCAUUUCUAUGUAU | 321 | 785 | Yes | No | No |
| 322 | UACAUAGAAAUGAAGCAGA | UCUGCUUCAUUUCUAUGUA | 323 | 786 | Yes | No | No |
| 324 | GCACAAAGAUGCAGUUUUA | UAAAACUGCAUCUUUGUGC | 325 | 806 | Yes | No | No |
| 326 | CACAAAGAUGCAGUUUUGA | UCAAAACUGCAUCUUUGUG | 327 | 807 | Yes | No | No |
| 328 | CAAAGAUGCAGUUUUGUGA | UCACAAAACUGCAUCUUUG | 329 | 809 | Yes | No | No |
| 330 | AAGAUGCAGUUUUGUGUGA | UCACACAAAACUGCAUCUU | 331 | 811 | Yes | No | No |
| 332 | AGAUGCAGUUUUGUGUGUA | UACACACAAAACUGCAUCU | 333 | 812 | Yes | No | No |
| 334 | GAUGCAGUUUUGUGUGUGA | UCACACACAAAACUGCAUC | 335 | 813 | Yes | No | No |
| 336 | UGCAGUUUUGUGUGUGGAA | UUCCACACACAAAACUGCA | 337 | 815 | Yes | No | No |
| 338 | GCAGUUUUGUGUGUGGAAA | UUUCCACACACAAAACUGC | 339 | 816 | Yes | No | No |
| 340 | AGUUUUGUGUGUGGAAUGA | UCAUUCCACACACAAAACU | 341 | 818 | Yes | No | No |
| 342 | GUUUUGUGUGUGGAAUGUA | UACAUUCCACACACAAAAC | 343 | 819 | Yes | No | Yes |
| 344 | UUUUGUGUGUGGAAUGUGA | UCACAUUCCACACACAAAA | 345 | 820 | Yes | No | Yes |
| 346 | UUUGUGUGUGGAAUGUGGA | UCCACAUUCCACACACAAA | 347 | 821 | Yes | No | Yes |
| 348 | UUGUGUGUGGAAUGUGGAA | UUCCACAUUCCACACACAA | 349 | 822 | Yes | No | No |
| 350 | UGUGUGUGGAAUGUGGAUA | UAUCCACAUUCCACACACA | 351 | 823 | Yes | No | No |
| 352 | GUGUGUGGAAUGUGGAUAA | UUAUCCACAUUCCACACAC | 353 | 824 | Yes | No | No |
| 354 | GUGUGGAAUGUGGAUAUAA | UUAUAUCCACAUUCCACAC | 355 | 826 | Yes | NO | No |
| 356 | UGUGGAAUGUGGAUAUAAA | UUUAUAUCCACAUUCCACA | 357 | 827 | Yes | No | No |
| 358 | GUGGAAUGUGGAUAUAAGA | UCUUAUAUCCACAUUCCAC | 359 | 828 | Yes | No | No |
| 360 | UGGAAUGUGGAUAUAAGUA | UACUUAUAUCCACAUUCCA | 361 | 829 | Yes | No | No |
| 362 | GGAAUGUGGAUAUAAGUAA | UUACUUAUAUCCACAUUCC | 363 | 830 | Yes | No | No |
| 364 | GAAUGUGGAUAUAAGUAUA | UAUACUUAUAUCCACAUUC | 365 | 831 | Yes | No | No |
| 366 | AAUGUGGAUAUAAGUAUAA | UUAUACUUAUAUCCACAUU | 367 | 832 | Yes | No | No |
| 368 | AUGUGGAUAUAAGUAUAGA | UCUAUACUUAUAUCCACAU | 369 | 833 | Yes | No | No |
| 370 | UGUGGAUAUAAGUAUAGAA | UUCUAUACUUAUAUCCACA | 371 | 834 | Yes | No | No |
| 372 | UGGAUAUAAGUAUAGAUUA | UAAUCUAUACUUAUAUCCA | 373 | 836 | Yes | No | No |
| 374 | GAUAUAAGUAUAGAUUCUA | UAGAAUCUAUACUUAUAUC | 375 | 838 | Yes | No | No |
| 376 | UAUAAGUAUAGAUUCUUUA | UAAAGAAUCUAUACUUAUA | 377 | 840 | Yes | No | No |
| 378 | UAAGUAUAGAUUCUUUGGA | UCCAAAGAAUCUAUACUUA | 379 | 842 | Yes | No | No |
| 380 | AAGUAUAGAUUCUUUGGGA | UCCCAAAGAAUCUAUACUU | 381 | 843 | Yes | No | No |
| 382 | UAUAGAUUCUUUGGGGAAA | UUUCCCCAAAGAAUCUAUA | 383 | 846 | Yes | No | No |
| 384 | AGAUUCUUUGGGGAAGAUA | UAUCUUCCCCAAAGAAUCU | 385 | 849 | Yes | Yes | No |
| 386 | UGCAGCCCGAGAGCUCAAA | UUUGAGCUCUCGGGCUGCA | 387 | 875 | Yes | No | No |
| 388 | AGCCCGAGAGCUCAAUAUA | UAUAUUGAGCUCUCGGGCU | 389 | 878 | Yes | No | No |
| 390 | GCCCGAGAGCUCAAUAUUA | UAAUAUUGAGCUCUCGGGC | 391 | 879 | Yes | No | No |
| 392 | CGAGAGCUCAAUAUUUAUA | UAUAAAUAUUGAGCUCUCG | 393 | 882 | Yes | No | No |
| 394 | GAGAGCUCAAUAUUUAUUA | UAAUAAAUAUUGAGCUCUC | 395 | 883 | Yes | No | No |
| 396 | GAGCUCAAUAUUUAUUGCA | UGCAAUAAAUAUUGAGCUC | 397 | 885 | Yes | No | No |
| 398 | CUCAAUAUUUAUUGCCAUA | UAUGGCAAUAAAUAUUGAG | 399 | 888 | Yes | No | No |
| 400 | UAUUUAUUGCCAUUUAGAA | UUCUAAAUGGCAAUAAAUA | 401 | 893 | Yes | No | No |
| 402 | UUUAUUGCCAUUUAGAUCA | UGAUCUAAAUGGCAAUAAA | 403 | 895 | Yes | No | No |
| 404 | UUAUUGCCAUUUAGAUCAA | UUGAUCUAAAUGGCAAUAA | 405 | 896 | Yes | No | No |
| 406 | UAUUGCCAUUUAGAUCACA | UGUGAUCUAAAUGGCAAUA | 407 | 897 | Yes | No | No |
| 408 | AUUGCCAUUUAGAUCACAA | UUGUGAUCUAAAUGGCAAU | 409 | 898 | Yes | No | No |
| 410 | UUGCCAUUUAGAUCACAAA | UUUGUGAUCUAAAUGGCAA | 411 | 899 | Yes | No | No |
| 412 | GCCAUUUAGAUCACAACUA | UAGUUGUGAUCUAAAUGGC | 413 | 901 | Yes | No | No |
| 414 | UUUAGAUCACAACUUUAUA | UAUAAAGUUGUGAUCUAAA | 415 | 905 | Yes | No | No |
| 416 | UUAGAUCACAACUUUAUGA | UCAUAAAGUUGUGAUCUAA | 417 | 906 | Yes | No | No |
| 418 | UAGAUCACAACUUUAUGAA | UUCAUAAAGUUGUGAUCUA | 419 | 907 | Yes | No | No |
| 420 | AGAUCACAACUUUAUGACA | UGUCAUAAAGUUGUGAUCU | 421 | 908 | Yes | No | No |
| 422 | AUCACAACUUUAUGACAGA | UCUGUCAUAAAGUUGUGAU | 423 | 910 | Yes | No | No |
| 424 | UCACAACUUUAUGACAGCA | UGCUGUCAUAAAGUUGUGA | 425 | 911 | Yes | No | No |
| 426 | CACAACUUUAUGACAGCAA | UUGCUGUCAUAAAGUUGUG | 427 | 912 | Yes | No | No |
| 428 | ACAACUUUAUGACAGCAAA | UUUGCUGUCAUAAAGUUGU | 429 | 913 | Yes | No | No |
| 430 | CAACUUUAUGACAGCAAGA | UCUUGCUGUCAUAAAGUUG | 431 | 914 | Yes | No | No |
| 432 | AACUUUAUGACAGCAAGUA | UACUUGCUGUCAUAAAGUU | 433 | 915 | Yes | No | No |
| 434 | CUUUAUGACAGCAAGUAUA | UAUACUUGCUGUCAUAAAG | 435 | 917 | Yes | No | No |
| 436 | AUGACAGCAAGUAUACCUA | UAGGUAUACUUGCUGUCAU | 437 | 921 | Yes | No | No |
| 438 | UGACAGCAAGUAUACCUAA | UUAGGUAUACUUGCUGUCA | 439 | 922 | Yes | No | No |
| 440 | GACAGCAAGUAUACCUACA | UGUAGGUAUACUUGCUGUC | 441 | 923 | Yes | No | No |
| 442 | CAGCAAGUAUACCUACUCA | UGAGUAGGUAUACUUGCUG | 443 | 925 | Yes | No | No |
| 444 | GCAAGUAUACCUACUCACA | UGUGAGUAGGUAUACUUGC | 445 | 927 | Yes | No | No |
| 446 | AGUAUACCUACUCACAGAA | UUCUGUGAGUAGGUAUACU | 447 | 930 | Yes | No | No |
| 448 | GUAUACCUACUCACAGACA | UGUCUGUGAGUAGGUAUAC | 449 | 931 | Yes | No | No |
| 450 | AUACCUACUCACAGACUGA | UCAGUCUGUGAGUAGGUAU | 451 | 933 | Yes | No | No |
| 452 | UACCUACUCACAGACUGUA | UACAGUCUGUGAGUAGGUA | 453 | 934 | Yes | No | No |
| 454 | ACCUACUCACAGACUGUUA | UAACAGUCUGUGAGUAGGU | 455 | 935 | Yes | No | No |
| 456 | ACUCACAGACUGUUUGUUA | UAACAAACAGUCUGUGAGU | 457 | 939 | Yes | No | No |
| 458 | CUCACAGACUGUUUGUUCA | UGAACAAACAGUCUGUGAG | 459 | 940 | Yes | No | No |
| 460 | CACAGACUGUUUGUUCAUA | UAUGAACAAACAGUCUGUG | 461 | 942 | Yes | No | No |
| 462 | ACAGACUGUUUGUUCAUGA | UCAUGAACAAACAGUCUGU | 463 | 943 | Yes | No | No |
| 464 | ACUGUUUGUUCAUGUACGA | UCGUACAUGAACAAACAGU | 465 | 947 | Yes | No | No |
| 466 | CUGUUUGUUCAUGUACGCA | UGCGUACAUGAACAAACAG | 467 | 948 | Yes | No | No |
| 468 | CGCCUGGUGGCAAAAGGAA | UUCCUUUUGCCACCAGGCG | 469 | 966 | Yes | No | No |
| 470 | CUGGUGGCAAAAGGAUAUA | UAUAUCCUUUUGCCACCAG | 471 | 969 | Yes | No | No |
| 472 | UGGUGGCAAAAGGAUAUAA | UUAUAUCCUUUUGCCACCA | 473 | 970 | Yes | No | No |
| 474 | GGUGGCAAAAGGAUAUAAA | UUUAUAUCCUUUUGCCACC | 475 | 971 | Yes | No | No |
| 476 | GUGGCAAAAGGAUAUAAGA | UCUUAUAUCCUUUUGCCAC | 477 | 972 | Yes | No | No |
| 478 | UGGCAAAAGGAUAUAAGGA | UCCUUAUAUCCUUUUGCCA | 479 | 973 | Yes | No | No |
| 480 | GGCAAAAGGAUAUAAGGUA | UACCUUAUAUCCUUUUGCC | 481 | 974 | Yes | No | No |
| 482 | GCAAAAGGAUAUAAGGUGA | UCACCUUAUAUCCUUUUGC | 483 | 975 | Yes | No | No |
| 484 | CAAAAGGAUAUAAGGUGGA | UCCACCUUAUAUCCUUUUG | 485 | 976 | Yes | No | No |
| 486 | GGAUAUAAGGUGGGAGUUA | UAACUCCCACCUUAUAUCC | 487 | 981 | Yes | No | No |
| 488 | UAUAAGGUGGGAGUUGUGA | UCACAACUCCCACCUUAUA | 489 | 984 | Yes | No | No |
| 490 | UAAGGUGGGAGUUGUGAAA | UUUCACAACUCCCACCUUA | 491 | 986 | Yes | No | No |
| 492 | AAGGUGGGAGUUGUGAAGA | UCUUCACAACUCCCACCUU | 493 | 987 | Yes | Yes | Yes |
| 494 | GUGGGAGUUGUGAAGCAAA | UUUGCUUCACAACUCCCAC | 495 | 990 | Yes | Yes | Yes |
| 496 | GGGAGUUGUGAAGCAAACA | UGUUUGCUUCACAACUCCC | 497 | 992 | Yes | Yes | Yes |
| 498 | GAGUUGUGAAGCAAACUGA | UCAGUUUGCUUCACAACUC | 499 | 994 | Yes | Yes | Yes |
| 500 | AGUUGUGAAGCAAACUGAA | UUCAGUUUGCUUCACAACU | 501 | 995 | Yes | Yes | Yes |
| 502 | GUUGUGAAGCAAACUGAAA | UUUCAGUUUGCUUCACAAC | 503 | 996 | Yes | Yes | Yes |
| 504 | UGUGAAGCAAACUGAAACA | UGUUUCAGUUUGCUUCACA | 505 | 998 | Yes | Yes | Yes |
| 506 | GAAGCAAACUGAAACUGCA | UGCAGUUUCAGUUUGCUUC | 507 | 1001 | Yes | Yes | Yes |
| 508 | AACUGAAACUGCAGCAUUA | UAAUGCUGCAGUUUCAGUU | 509 | 1007 | Yes | No | No |
| 510 | ACUGAAACUGCAGCAUUAA | UUAAUGCUGCAGUUUCAGU | 511 | 1008 | Yes | No | No |
| 512 | CUGAAACUGCAGCAUUAAA | UUUAAUGCUGCAGUUUCAG | 513 | 1009 | Yes | No | No |
| 514 | UGAAACUGCAGCAUUAAAA | UUUUAAUGCUGCAGUUUCA | 515 | 1010 | Yes | No | No |
| 516 | AACUGCAGCAUUAAAGGCA | UGCCUUUAAUGCUGCAGUU | 517 | 1013 | Yes | No | No |
| 518 | CUGCAGCAUUAAAGGCCAA | UUGGCCUUUAAUGCUGCAG | 519 | 1015 | Yes | No | No |
| 520 | GCAUUAAAGGCCAUUGGAA | UUCCAAUGGCCUUUAAUGC | 521 | 1020 | Yes | No | Yes |
| 522 | AUUAAAGGCCAUUGGAGAA | UUCUCCAAUGGCCUUUAAU | 523 | 1022 | Yes | No | Yes |
| 524 | UUAAAGGCCAUUGGAGACA | UGUCUCCAAUGGCCUUUAA | 525 | 1023 | Yes | No | Yes |
| 526 | UAAAGGCCAUUGGAGACAA | UUGUCUCCAAUGGCCUUUA | 527 | 1024 | Yes | No | Yes |
| 528 | AAAGGCCAUUGGAGACAAA | UUUGUCUCCAAUGGCCUUU | 529 | 1025 | Yes | No | Yes |
| 530 | AAGGCCAUUGGAGACAACA | UGUUGUCUCCAAUGGCCUU | 531 | 1026 | Yes | No | No |
| 532 | GGCCAUUGGAGACAACAGA | UCUGUUGUCUCCAAUGGCC | 533 | 1028 | Yes | No | No |
| 534 | GCCAUUGGAGACAACAGAA | UUCUGUUGUCUCCAAUGGC | 535 | 1029 | Yes | No | No |
| 536 | CCAUUGGAGACAACAGAAA | UUUCUGUUGUCUCCAAUGG | 537 | 1030 | Yes | No | No |
| 538 | CAUUGGAGACAACAGAAGA | UCUUCUGUUGUCUCCAAUG | 539 | 1031 | Yes | No | No |
| 540 | AUUGGAGACAACAGAAGUA | UACUUCUGUUGUCUCCAAU | 541 | 1032 | Yes | No | No |
| 542 | UUGGAGACAACAGAAGUUA | UAACUUCUGUUGUCUCCAA | 543 | 1033 | Yes | No | No |
| 544 | UGGAGACAACAGAAGUUCA | UGAACUUCUGUUGUCUCCA | 545 | 1034 | Yes | No | No |
| 546 | GAGACAACAGAAGUUCACA | UGUGAACUUCUGUUGUCUC | 547 | 1036 | Yes | No | No |
| 548 | ACAACAGAAGUUCACUCUA | UAGAGUGAACUUCUGUUGU | 549 | 1039 | Yes | No | No |
| 550 | CAACAGAAGUUCACUCUUA | UAAGAGUGAACUUCUGUUG | 551 | 1040 | Yes | No | No |
| 552 | ACAGAAGUUCACUCUUUUA | UAAAAGAGUGAACUUCUGU | 553 | 1042 | Yes | No | No |
| 554 | CAGAAGUUCACUCUUUUCA | UGAAAAGAGUGAACUUCUG | 555 | 1043 | Yes | No | No |
| 556 | GAAGUUCACUCUUUUCCCA | UGGGAAAAGAGUGAACUUC | 557 | 1045 | Yes | No | No |
| 558 | UCUUUUCCCGGAAAUUGAA | UUCAAUUUCCGGGAAAAGA | 559 | 1054 | Yes | No | Yes |
| 560 | CUUUUCCCGGAAAUUGACA | UGUCAAUUUCCGGGAAAAG | 561 | 1055 | Yes | No | Yes |
| 562 | UUUUCCCGGAAAUUGACUA | UAGUCAAUUUCCGGGAAAA | 563 | 1056 | Yes | No | Yes |
| 564 | UUCCCGGAAAUUGACUGCA | UGCAGUCAAUUUCCGGGAA | 565 | 1058 | Yes | No | Yes |
| 566 | GGAAAUUGACUGCCCUUUA | UAAAGGGCAGUCAAUUUCC | 567 | 1063 | Yes | No | No |
| 568 | GAAAUUGACUGCCCUUUAA | UUAAAGGGCAGUCAAUUUC | 569 | 1064 | Yes | No | No |
| 570 | AAAUUGACUGCCCUUUAUA | UAUAAAGGGCAGUCAAUUU | 571 | 1065 | Yes | No | No |
| 572 | UUGACUGCCCUUUAUACAA | UUGUAUAAAGGGCAGUCAA | 573 | 1068 | Yes | No | No |
| 574 | CUGCCCUUUAUACAAAAUA | UAUUUUGUAUAAAGGGCAG | 575 | 1072 | Yes | No | No |
| 576 | UGCCCUUUAUACAAAAUCA | UGAUUUUGUAUAAAGGGCA | 577 | 1073 | Yes | No | No |
| 578 | GCCCUUUAUACAAAAUCUA | UAGAUUUUGUAUAAAGGGC | 579 | 1074 | Yes | No | No |
| 580 | CCCUUUAUACAAAAUCUAA | UUAGAUUUUGUAUAAAGGG | 581 | 1075 | Yes | No | No |
| 582 | CCUUUAUACAAAAUCUACA | UGUAGAUUUUGUAUAAAGG | 583 | 1076 | Yes | No | No |
| 584 | UUAUACAAAAUCUACACUA | UAGUGUAGAUUUUGUAUAA | 585 | 1079 | Yes | No | No |
| 586 | UAUACAAAAUCUACACUUA | UAAGUGUAGAUUUUGUAUA | 587 | 1080 | No | No | No |
| 588 | AUACAAAAUCUACACUUAA | UUAAGUGUAGAUUUUGUAU | 589 | 1081 | No | No | No |
| 590 | CAAAAUCUACACUUAUUGA | UCAAUAAGUGUAGAUUUUG | 591 | 1084 | No | No | No |
| 592 | AAAAUCUACACUUAUUGGA | UCCAAUAAGUGUAGAUUUU | 593 | 1085 | No | No | No |
| 594 | AAAUCUACACUUAUUGGAA | UUCCAAUAAGUGUAGAUUU | 595 | 1086 | No | No | No |
| 596 | AUCUACACUUAUUGGAGAA | UUCUCCAAUAAGUGUAGAU | 597 | 1088 | No | No | No |
| 598 | UCUACACUUAUUGGAGAAA | UUUCUCCAAUAAGUGUAGA | 599 | 1089 | No | No | No |
| 600 | CACUUAUUGGAGAAGAUGA | UCAUCUUCUCCAAUAAGUG | 601 | 1093 | No | No | No |
| 602 | ACUUAUUGGAGAAGAUGUA | UACAUCUUCUCCAAUAAGU | 603 | 1094 | No | No | No |
| 604 | CUUAUUGGAGAAGAUGUGA | UCACAUCUUCUCCAAUAAG | 605 | 1095 | No | No | No |
| 606 | UUAUUGGAGAAGAUGUGAA | UUCACAUCUUCUCCAAUAA | 607 | 1096 | No | No | No |
| 608 | AGAAGAUGUGAAUCCCCUA | UAGGGGAUUCACAUCUUCU | 609 | 1103 | Yes | No | No |
| 610 | GAAGAUGUGAAUCCCCUAA | UUAGGGGAUUCACAUCUUC | 611 | 1104 | Yes | No | No |
| 612 | AGAUGUGAAUCCCCUAAUA | UAUUAGGGGAUUCACAUCU | 613 | 1106 | Yes | No | No |
| 614 | GAUGUGAAUCCCCUAAUCA | UGAUUAGGGGAUUCACAUC | 615 | 1107 | Yes | No | No |
| 616 | UGUGAAUCCCCUAAUCAAA | UUUGAUUAGGGGAUUCACA | 617 | 1109 | Yes | No | No |
| 618 | GUGAAUCCCCUAAUCAAGA | UCUUGAUUAGGGGAUUCAC | 619 | 1110 | Yes | No | No |
| 620 | UGAAUCCCCUAAUCAAGCA | UGCUUGAUUAGGGGAUUCA | 621 | 1111 | Yes | No | No |
| 622 | GAAUCCCCUAAUCAAGCUA | UAGCUUGAUUAGGGGAUUC | 623 | 1112 | Yes | No | No |
| 624 | CUAAUCAAGCUGGAUGAUA | UAUCAUCCAGCUUGAUUAG | 625 | 1119 | Yes | No | No |
| 626 | UAAUCAAGCUGGAUGAUGA | UCAUCAUCCAGCUUGAUUA | 627 | 1120 | Yes | No | No |
| 628 | AAUCAAGCUGGAUGAUGCA | UGCAUCAUCCAGCUUGAUU | 629 | 1121 | Yes | No | No |
| 630 | CAAGCUGGAUGAUGCUGUA | UACAGCAUCAUCCAGCUUG | 631 | 1124 | Yes | No | No |
| 632 | AGCUGGAUGAUGCUGUAAA | UUUACAGCAUCAUCCAGCU | 633 | 1126 | Yes | No | No |
| 634 | UGGAUGAUGCUGUAAAUGA | UCAUUUACAGCAUCAUCCA | 635 | 1129 | Yes | No | No |
| 636 | GAUGAUGCUGUAAAUGUUA | UAACAUUUACAGCAUCAUC | 637 | 1131 | Yes | No | No |
| 638 | UGUAAAUGUUGAUGAGAUA | UAUCUCAUCAACAUUUACA | 639 | 1139 | Yes | No | No |
| 640 | GUAAAUGUUGAUGAGAUAA | UUAUCUCAUCAACAUUUAC | 641 | 1140 | Yes | No | No |
| 642 | UAAAUGUUGAUGAGAUAAA | UUUAUCUCAUCAACAUUUA | 643 | 1141 | Yes | No | No |
| 644 | AUGUUGAUGAGAUAAUGAA | UUCAUUAUCUCAUCAACAU | 645 | 1144 | Yes | No | No |
| 646 | UGUUGAUGAGAUAAUGACA | UGUCAUUAUCUCAUCAACA | 647 | 1145 | Yes | No | No |
| 648 | GUUGAUGAGAUAAUGACUA | UAGUCAUUAUCUCAUCAAC | 649 | 1146 | Yes | No | No |
| 650 | UUGAUGAGAUAAUGACUGA | UCAGUCAUUAUCUCAUCAA | 651 | 1147 | Yes | No | No |
| 652 | UGAUGAGAUAAUGACUGAA | UUCAGUCAUUAUCUCAUCA | 653 | 1148 | Yes | No | No |
| 654 | GAUGAGAUAAUGACUGAUA | UAUCAGUCAUUAUCUCAUC | 655 | 1149 | Yes | No | No |
| 656 | AGAUAAUGACUGAUACUUA | UAAGUAUCAGUCAUUAUCU | 657 | 1153 | Yes | No | No |
| 658 | GAUAAUGACUGAUACUUCA | UGAAGUAUCAGUCAUUAUC | 659 | 1154 | Yes | No | No |
| 660 | AUAAUGACUGAUACUUCUA | UAGAAGUAUCAGUCAUUAU | 661 | 1155 | Yes | No | No |
| 662 | AAUGACUGAUACUUCUACA | UGUAGAAGUAUCAGUCAUU | 663 | 1157 | Yes | No | No |
| 664 | UGACUGAUACUUCUACCAA | UUGGUAGAAGUAUCAGUCA | 665 | 1159 | Yes | No | No |
| 666 | GACUGAUACUUCUACCAGA | UCUGGUAGAAGUAUCAGUC | 667 | 1160 | Yes | No | No |
| 668 | UGAUACUUCUACCAGCUAA | UUAGCUGGUAGAAGUAUCA | 669 | 1163 | Yes | No | No |
| 670 | GAUACUUCUACCAGCUAUA | UAUAGCUGGUAGAAGUAUC | 671 | 1164 | Yes | No | No |
| 672 | ACUUCUACCAGCUAUCUUA | UAAGAUAGCUGGUAGAAGU | 673 | 1167 | Yes | No | No |
| 674 | UUCUACCAGCUAUCUUCUA | UAGAAGAUAGCUGGUAGAA | 675 | 1169 | Yes | No | No |
| 676 | UCUACCAGCUAUCUUCUGA | UCAGAAGAUAGCUGGUAGA | 677 | 1170 | Yes | No | No |
| 678 | CUACCAGCUAUCUUCUGUA | UACAGAAGAUAGCUGGUAG | 679 | 1171 | Yes | No | No |
| 680 | UACCAGCUAUCUUCUGUGA | UCACAGAAGAUAGCUGGUA | 681 | 1172 | Yes | No | No |
| 682 | ACCAGCUAUCUUCUGUGCA | UGCACAGAAGAUAGCUGGU | 683 | 1173 | Yes | No | No |
| 684 | CCAGCUAUCUUCUGUGCAA | UUGCACAGAAGAUAGCUGG | 685 | 1174 | Yes | No | No |
| 686 | GCUAUCUUCUGUGCAUCUA | UAGAUGCACAGAAGAUAGC | 687 | 1177 | Yes | No | No |
| 688 | CUAUCUUCUGUGCAUCUCA | UGAGAUGCACAGAAGAUAG | 689 | 1178 | Yes | No | No |
| 690 | AUCUCUGAAAAUAAGGAAA | UUUCCUUAUUUUCAGAGAU | 691 | 1191 | Yes | No | No |
| 692 | GAAAAUAAGGAAAAUGUUA | UAACAUUUUCCUUAUUUUC | 693 | 1197 | Yes | No | No |
| 694 | AAAAUAAGGAAAAUGUUAA | UUAACAUUUUCCUUAUUUU | 695 | 1198 | Yes | No | No |
| 696 | AGGAAAAUGUUAGGGACAA | UUGUCCCUAACAUUUUCCU | 697 | 1204 | Yes | No | No |
| 698 | GGAAAAUGUUAGGGACAAA | UUUGUCCCUAACAUUUUCC | 699 | 1205 | Yes | No | No |
| 700 | UUUUAUUGGCAUUGUGGGA | UCCCACAAUGCCAAUAAAA | 701 | 1238 | Yes | No | No |
| 702 | UGCCACAGGCGAGGUUGUA | UACAACCUCGCCUGUGGCA | 703 | 1265 | Yes | No | No |
| 704 | CCACAGGCGAGGUUGUGUA | UACACAACCUCGCCUGUGG | 705 | 1267 | Yes | No | No |
| 706 | CACAGGCGAGGUUGUGUUA | UAACACAACCUCGCCUGUG | 707 | 1268 | Yes | No | No |
| 708 | CAGGCGAGGUUGUGUUUGA | UCAAACACAACCUCGCCUG | 709 | 1270 | Yes | No | No |
| 710 | AGGCGAGGUUGUGUUUGAA | UUCAAACACAACCUCGCCU | 711 | 1271 | Yes | No | No |
| 712 | GGCGAGGUUGUGUUUGAUA | UAUCAAACACAACCUCGCC | 713 | 1272 | Yes | No | No |
| 714 | GCGAGGUUGUGUUUGAUAA | UUAUCAAACACAACCUCGC | 715 | 1273 | Yes | No | No |
| 716 | CGAGGUUGUGUUUGAUAGA | UCUAUCAAACACAACCUCG | 717 | 1274 | Yes | No | No |
| 718 | GAGGUUGUGUUUGAUAGUA | UACUAUCAAACACAACCUC | 719 | 1275 | Yes | No | No |
| 720 | AGGUUGUGUUUGAUAGUUA | UAACUAUCAAACACAACCU | 721 | 1276 | Yes | No | No |
| 722 | GGUUGUGUUUGAUAGUUUA | UAAACUAUCAAACACAACC | 723 | 1277 | Yes | No | No |
| 724 | GUUGUGUUUGAUAGUUUCA | UGAAACUAUCAAACACAAC | 725 | 1278 | Yes | No | No |
| 726 | GUUUGAUAGUUUCCAGGAA | UUCCUGGAAACUAUCAAAC | 727 | 1283 | Yes | No | No |
| 728 | CAGGACUCUGCUUCUCGUA | UACGAGAAGCAGAGUCCUG | 729 | 1296 | Yes | No | No |
| 730 | AGGACUCUGCUUCUCGUUA | UAACGAGAAGCAGAGUCCU | 731 | 1297 | Yes | No | No |
| 732 | GGACUCUGCUUCUCGUUCA | UGAACGAGAAGCAGAGUCC | 733 | 1298 | Yes | No | No |
| 734 | GACUCUGCUUCUCGUUCAA | UUGAACGAGAAGCAGAGUC | 735 | 1299 | Yes | No | No |
| 736 | ACUCUGCUUCUCGUUCAGA | UCUGAACGAGAAGCAGAGU | 737 | 1300 | Yes | No | No |
| 738 | GCUUCUCGUUCAGAGCUAA | UUAGCUCUGAACGAGAAGC | 739 | 1305 | Yes | No | No |
| 740 | CUUCUCGUUCAGAGCUAGA | UCUAGCUCUGAACGAGAAG | 741 | 1306 | Yes | No | No |
| 742 | UUCUCGUUCAGAGCUAGAA | UUCUAGCUCUGAACGAGAA | 743 | 1307 | Yes | No | No |
| 744 | UCUCGUUCAGAGCUAGAAA | UUUCUAGCUCUGAACGAGA | 745 | 1308 | Yes | No | No |
| 746 | UCGUUCAGAGCUAGAAACA | UGUUUCUAGCUCUGAACGA | 747 | 1310 | Yes | No | No |
| 748 | UAGAAACCCGGAUGUCAAA | UUUGACAUCCGGGUUUCUA | 749 | 1321 | Yes | No | No |
| 750 | GAAACCCGGAUGUCAAGCA | UGCUUGACAUCCGGGUUUC | 751 | 1323 | No | No | No |
| 752 | AAGCCUGCAGCCAGUAGAA | UUCUACUGGCUGCAGGCUU | 753 | 1337 | No | No | No |
| 754 | CUGCAGCCAGUAGAGCUGA | UCAGCUCUACUGGCUGCAG | 755 | 1341 | Yes | No | No |
| 756 | UCCUUCGGCCUUGUCCGAA | UUCGGACAAGGCCGAAGGA | 757 | 1364 | Yes | No | No |
| 758 | CGGCCUUGUCCGAGCAAAA | UUUUGCUCGGACAAGGCCG | 759 | 1369 | Yes | No | No |
| 760 | CCUUGUCCGAGCAAACAGA | UCUGUUUGCUCGGACAAGG | 761 | 1372 | Yes | No | No |
| 762 | CUUGUCCGAGCAAACAGAA | UUCUGUUUGCUCGGACAAG | 763 | 1373 | Yes | No | No |
| 764 | UGUCCGAGCAAACAGAGGA | UCCUCUGUUUGCUCGGACA | 765 | 1375 | No | No | No |
| 766 | AACAGAGGCGCUCAUCCAA | UUGGAUGAGCGCCUCUGUU | 767 | 1385 | Vo | No | No |
| 768 | ACAGAGGCGCUCAUCCACA | UGUGGAUGAGCGCCUCUGU | 769 | 1386 | No | No | No |
| 770 | CAGAGGCGCUCAUCCACAA | UUGUGGAUGAGCGCCUCUG | 771 | 1387 | No | No | No |
| 772 | AGAGGCGCUCAUCCACAGA | UCUGUGGAUGAGCGCCUCU | 773 | 1388 | No | No | No |
| 774 | GAGGCGCUCAUCCACAGAA | UUCUGUGGAUGAGCGCCUC | 775 | 1389 | No | No | No |
| 776 | CACAGAGCCACAUCUGUUA | UAACAGAUGUGGCUCUGUG | 777 | 1401 | Yes | No | No |
| 778 | AGAGCCACAUCUGUUAGUA | UACUAACAGAUGUGGCUCU | 779 | 1404 | Yes | No | No |
| 780 | AGCCACAUCUGUUAGUGUA | UACACUAACAGAUGUGGCU | 781 | 1406 | Yes | No | No |
| 782 | GCCACAUCUGUUAGUGUGA | UCACACUAACAGAUGUGGC | 783 | 1407 | Yes | No | No |
| 784 | CCACAUCUGUUAGUGUGCA | UGCACACUAACAGAUGUGG | 785 | 1408 | Yes | No | No |
| 786 | UCUGUUAGUGUGCAGGAUA | UAUCCUGCACACUAACAGA | 787 | 1413 | Yes | No | No |
| 788 | GUUAGUGUGCAGGAUGACA | UGUCAUCCUGCACACUAAC | 789 | 1416 | Yes | No | No |
| 790 | UUAGUGUGCAGGAUGACAA | UUGUCAUCCUGCACACUAA | 791 | 1417 | Yes | No | No |
| 792 | GUGUGCAGGAUGACAGAAA | UUUCUGUCAUCCUGCACAC | 793 | 1420 | Yes | No | No |
| 794 | UGUGCAGGAUGACAGAAUA | UAUUCUGUCAUCCUGCACA | 795 | 1421 | Yes | No | No |
| 796 | GUGCAGGAUGACAGAAUUA | UAAUUCUGUCAUCCUGCAC | 797 | 1422 | Yes | No | No |
| 798 | AGGAUGACAGAAUUCGAGA | UCUCGAAUUCUGUCAUCCU | 799 | 1426 | Yes | No | No |
| 800 | ACAGAAUUCGAGUCGAAAA | UUUUCGACUCGAAUUCUGU | 801 | 1432 | No | No | No |
| 802 | CAGAAUUCGAGUCGAAAGA | UCUUUCGACUCGAAUUCUG | 803 | 1433 | No | No | No |
| 804 | AGAAUUCGAGUCGAAAGGA | UCCUUUCGACUCGAAUUCU | 805 | 1434 | No | No | No |
| 806 | UUCGAGUCGAAAGGAUGGA | UCCAUCCUUUCGACUCGAA | 807 | 1438 | No | No | No |
| 808 | CGAGUCGAAAGGAUGGAUA | UAUCCAUCCUUUCGACUCG | 809 | 1440 | No | No | No |
| 810 | GAGUCGAAAGGAUGGAUAA | UUAUCCAUCCUUUCGACUC | 811 | 1441 | No | No | No |
| 812 | AGUCGAAAGGAUGGAUAAA | UUUAUCCAUCCUUUCGACU | 813 | 1442 | No | No | No |
| 814 | GUCGAAAGGAUGGAUAACA | UGUUAUCCAUCCUUUCGAC | 815 | 1443 | No | No | No |
| 816 | UCGAAAGGAUGGAUAACAA | UUGUUAUCCAUCCUUUCGA | 817 | 1444 | No | No | No |
| 818 | CGAAAGGAUGGAUAACAUA | UAUGUUAUCCAUCCUUUCG | 819 | 1445 | No | No | No |
| 820 | GAAAGGAUGGAUAACAUUA | UAAUGUUAUCCAUCCUUUC | 821 | 1446 | Yes | No | No |
| 822 | AAAGGAUGGAUAACAUUUA | UAAAUGUUAUCCAUCCUUU | 823 | 1447 | Yes | No | No |
| 824 | AGGAUGGAUAACAUUUAUA | UAUAAAUGUUAUCCAUCCU | 825 | 1449 | Yes | No | No |
| 826 | GGAUAACAUUUAUUUUGAA | UUCAAAAUAAAUGUUAUCC | 827 | 1454 | Yes | No | No |
| 828 | GAUAACAUUUAUUUUGAAA | UUUCAAAAUAAAUGUUAUC | 829 | 1455 | Yes | No | No |
| 830 | AUAACAUUUAUUUUGAAUA | UAUUCAAAAUAAAUGUUAU | 831 | 1456 | Yes | No | No |
| 832 | UGAAUACAGCCAUGCUUUA | UAAAGCAUGGCUGUAUUCA | 833 | 1469 | Yes | Yes | Yes |
| 834 | CAUGCUUUCCAGGCAGUUA | UAACUGCCUGGAAAGCAUG | 835 | 1479 | Yes | No | No |
| 836 | AUGCUUUCCAGGCAGUUAA | UUAACUGCCUGGAAAGCAU | 837 | 1480 | Yes | No | No |
| 838 | UGCUUUCCAGGCAGUUACA | UGUAACUGCCUGGAAAGCA | 839 | 1481 | Yes | No | No |
| 840 | GCUUUCCAGGCAGUUACAA | UUGUAACUGCCUGGAAAGC | 841 | 1482 | Yes | No | No |
| 842 | UCCAGGCAGUUACAGAGUA | UACUCUGUAACUGCCUGGA | 843 | 1486 | Yes | No | No |
| 844 | CAGGCAGUUACAGAGUUUA | UAAACUCUGUAACUGCCUG | 845 | 1488 | Yes | No | No |
| 846 | GCAGUUACAGAGUUUUAUA | UAUAAAACUCUGUAACUGC | 847 | 1491 | Yes | No | No |
| 848 | CAGUUACAGAGUUUUAUGA | UCAUAAAACUCUGUAACUG | 849 | 1492 | Yes | No | No |
| 850 | GUUACAGAGUUUUAUGCAA | UUGCAUAAAACUCUGUAAC | 851 | 1494 | Yes | No | No |
| 852 | UUACAGAGUUUUAUGCAAA | UUUGCAUAAAACUCUGUAA | 853 | 1495 | Yes | No | No |
| 854 | UACAGAGUUUUAUGCAAAA | UUUUGCAUAAAACUCUGUA | 855 | 1496 | Yes | No | No |
| 856 | UUUUAUGCAAAAGAUACAA | UUGUAUCUUUUGCAUAAAA | 857 | 1503 | No | No | No |
| 858 | UAUGCAAAAGAUACAGUUA | UAACUGUAUCUUUUGCAUA | 859 | 1506 | No | No | No |
| 860 | UGCAAAAGAUACAGUUGAA | UUCAACUGUAUCUUUUGCA | 861 | 1508 | No | No | No |
| 862 | GCAAAAGAUACAGUUGACA | UGUCAACUGUAUCUUUUGC | 863 | 1509 | No | No | No |
| 864 | CAAAAGAUACAGUUGACAA | UUGUCAACUGUAUCUUUUG | 865 | 1510 | No | No | No |
| 866 | AAAAGAUACAGUUGACAUA | UAUGUCAACUGUAUCUUUU | 867 | 1511 | No | No | No |
| 868 | GAUACAGUUGACAUCAAAA | UUUUGAUGUCAACUGUAUC | 869 | 1515 | No | No | No |
| 870 | AUACAGUUGACAUCAAAGA | UCUUUGAUGUCAACUGUAU | 871 | 1516 | No | No | No |
| 872 | UACAGUUGACAUCAAAGGA | UCCUUUGAUGUCAACUGUA | 873 | 1517 | No | No | No |
| 874 | ACAGUUGACAUCAAAGGUA | UACCUUUGAUGUCAACUGU | 875 | 1518 | Yes | No | No |
| 876 | CAGUUGACAUCAAAGGUUA | UAACCUUUGAUGUCAACUG | 877 | 1519 | Yes | No | No |
| 878 | AGUUGACAUCAAAGGUUCA | UGAACCUUUGAUGUCAACU | 879 | 1520 | Yes | No | No |
| 880 | GUUGACAUCAAAGGUUCUA | UAGAACCUUUGAUGUCAAC | 881 | 1521 | Yes | No | No |
| 882 | UUGACAUCAAAGGUUCUCA | UGAGAACCUUUGAUGUCAA | 883 | 1522 | Yes | No | No |
| 884 | UGACAUCAAAGGUUCUCAA | UUGAGAACCUUUGAUGUCA | 885 | 1523 | Yes | No | No |
| 886 | GACAUCAAAGGUUCUCAAA | UUUGAGAACCUUUGAUGUC | 887 | 1524 | Yes | No | No |
| 888 | UCAAAGGUUCUCAAAUUAA | UUAAUUUGAGAACCUUUGA | 889 | 1528 | Yes | No | No |
| 890 | AAGGUUCUCAAAUUAUUUA | UAAAUAAUUUGAGAACCUU | 891 | 1531 | Yes | No | No |
| 892 | UCAAAUUAUUUCUGGCAUA | UAUGCCAGAAAUAAUUUGA | 893 | 1538 | Yes | No | No |
| 894 | CAAAUUAUUUCUGGCAUUA | UAAUGCCAGAAAUAAUUUG | 895 | 1539 | Yes | No | No |
| 896 | AAUUAUUUCUGGCAUUGUA | UACAAUGCCAGAAAUAAUU | 897 | 1541 | Yes | No | No |
| 898 | AUUAUUUCUGGCAUUGUUA | UAACAAUGCCAGAAAUAAU | 899 | 1542 | Yes | No | No |
| 900 | UUAUUUCUGGCAUUGUUAA | UUAACAAUGCCAGAAAUAA | 901 | 1543 | Yes | No | No |
| 902 | UUUCUGGCAUUGUUAACUA | UAGUUAACAAUGCCAGAAA | 903 | 1546 | Yes | No | No |
| 904 | UUCUGGCAUUGUUAACUUA | UAAGUUAACAAUGCCAGAA | 905 | 1547 | Yes | No | No |
| 906 | CUGGCAUUGUUAACUUAGA | UCUAAGUUAACAAUGCCAG | 907 | 1549 | Yes | No | No |
| 908 | GCAUUGUUAACUUAGAGAA | UUCUCUAAGUUAACAAUGC | 909 | 1552 | Yes | No | No |
| 910 | GUUAACUUAGAGAAGCCUA | UAGGCUUCUCUAAGUUAAC | 911 | 1557 | Yes | No | No |
| 912 | UAACUUAGAGAAGCCUGUA | UACAGGCUUCUCUAAGUUA | 913 | 1559 | Yes | No | No |
| 914 | UAGAGAAGCCUGUGAUUUA | UAAAUCACAGGCUUCUCUA | 915 | 1564 | Yes | No | No |
| 916 | AAGCCUGUGAUUUGCUCUA | UAGAGCAAAUCACAGGCUU | 917 | 1569 | Yes | No | No |
| 918 | GCCUGUGAUUUGCUCUUUA | UAAAGAGCAAAUCACAGGC | 919 | 1571 | Yes | No | No |
| 920 | UGUGAUUUGCUCUUUGGCA | UGCCAAAGAGCAAAUCACA | 921 | 1574 | Yes | No | No |
| 922 | GUGAUUUGCUCUUUGGCUA | UAGCCAAAGAGCAAAUCAC | 923 | 1575 | Yes | No | No |
| 924 | GCUCUUUGGCUGCCAUCAA | UUGAUGGCAGCCAAAGAGC | 925 | 1582 | Yes | No | No |
| 926 | UCUUUGGCUGCCAUCAUAA | UUAUGAUGGCAGCCAAAGA | 927 | 1584 | Yes | No | No |
| 928 | CUUUGGCUGCCAUCAUAAA | UUUAUGAUGGCAGCCAAAG | 929 | 1585 | Yes | No | No |
| 930 | UUUGGCUGCCAUCAUAAAA | UUUUAUGAUGGCAGCCAAA | 931 | 1586 | Yes | No | No |
| 932 | UGGCUGCCAUCAUAAAAUA | UAUUUUAUGAUGGCAGCCA | 933 | 1588 | Yes | No | No |
| 934 | GGCUGCCAUCAUAAAAUAA | UUAUUUUAUGAUGGCAGCC | 935 | 1589 | Yes | No | No |
| 936 | GCUGCCAUCAUAAAAUACA | UGUAUUUUAUGAUGGCAGC | 937 | 1590 | Yes | No | No |
| 938 | UGCCAUCAUAAAAUACCUA | UAGGUAUUUUAUGAUGGCA | 939 | 1592 | Yes | No | No |
| 940 | GCCAUCAUAAAAUACCUCA | UGAGGUAUUUUAUGAUGGC | 941 | 1593 | Yes | No | No |
| 942 | CAUCAUAAAAUACCUCAAA | UUUGAGGUAUUUUAUGAUG | 943 | 1595 | Yes | No | No |
| 944 | CAUAAAAUACCUCAAAGAA | UUCUUUGAGGUAUUUUAUG | 945 | 1598 | Yes | No | No |
| 946 | UACCUCAAAGAAUUCAACA | UGUUGAAUUCUUUGAGGUA | 947 | 1605 | Yes | No | No |
| 948 | CCUCAAAGAAUUCAACUUA | UAAGUUGAAUUCUUUGAGG | 949 | 1607 | Yes | No | No |
| 950 | UCAACUUGGAAAAGAUGCA | UGCAUCUUUUCCAAGUUGA | 951 | 1618 | No | No | No |
| 952 | CAACUUGGAAAAGAUGCUA | UAGCAUCUUUUCCAAGUUG | 953 | 1619 | No | No | No |
| 954 | GGAAAAGAUGCUCUCCAAA | UUUGGAGAGCAUCUUUUCC | 955 | 1625 | No | No | No |
| 956 | AAAGAUGCUCUCCAAACCA | UGGUUUGGAGAGCAUCUUU | 957 | 1628 | No | No | No |
| 958 | GAUGCUCUCCAAACCUGAA | UUCAGGUUUGGAGAGCAUC | 959 | 1631 | No | No | No |
| 960 | AUGCUCUCCAAACCUGAGA | UCUCAGGUUUGGAGAGCAU | 961 | 1632 | Yes | No | No |
| 962 | GCUCUCCAAACCUGAGAAA | UUUCUCAGGUUUGGAGAGC | 963 | 1634 | Yes | No | No |
| 964 | CUCUCCAAACCUGAGAAUA | UAUUCUCAGGUUUGGAGAG | 965 | 1635 | Yes | No | No |
| 966 | UCUCCAAACCUGAGAAUUA | UAAUUCUCAGGUUUGGAGA | 967 | 1636 | Yes | No | No |
| 968 | CUCCAAACCUGAGAAUUUA | UAAAUUCUCAGGUUUGGAG | 969 | 1637 | Yes | No | No |
| 970 | AACCUGAGAAUUUUAAACA | UGUUUAAAAUUCUCAGGUU | 971 | 1642 | Yes | No | No |
| 972 | CCUGAGAAUUUUAAACAGA | UCUGUUUAAAAUUCUCAGG | 973 | 1644 | Yes | No | No |
| 974 | CUGAGAAUUUUAAACAGCA | UGCUGUUUAAAAUUCUCAG | 975 | 1645 | Yes | No | No |
| 976 | GAGAAUUUUAAACAGCUAA | UUAGCUGUUUAAAAUUCUC | 977 | 1647 | Yes | No | No |
| 978 | AGAAUUUUAAACAGCUAUA | UAUAGCUGUUUAAAAUUCU | 979 | 1648 | Yes | No | No |
| 980 | GAAUUUUAAACAGCUAUCA | UGAUAGCUGUUUAAAAUUC | 981 | 1649 | Yes | No | No |
| 982 | UAAACAGCUAUCAAGUAAA | UUUACUUGAUAGCUGUUUA | 983 | 1655 | Yes | No | No |
| 984 | AAACAGCUAUCAAGUAAAA | UUUUACUUGAUAGCUGUUU | 985 | 1656 | Yes | No | No |
| 986 | CAGCUAUCAAGUAAAAUGA | UCAUUUUACUUGAUAGCUG | 987 | 1659 | Yes | No | No |
| 988 | GCUAUCAAGUAAAAUGGAA | UUCCAUUUUACUUGAUAGC | 989 | 1661 | Yes | No | No |
| 990 | CUAUCAAGUAAAAUGGAAA | UUUCCAUUUUACUUGAUAG | 991 | 1662 | Yes | No | No |
| 992 | UAUCAAGUAAAAUGGAAUA | UAUUCCAUUUUACUUGAUA | 993 | 1663 | Yes | No | No |
| 994 | UCAAGUAAAAUGGAAUUUA | UAAAUUCCAUUUUACUUGA | 995 | 1665 | Yes | No | No |
| 996 | CAAGUAAAAUGGAAUUUAA | UUAAAUUCCAUUUUACUUG | 997 | 1666 | Yes | No | No |
| 998 | AAAAUGGAAUUUAUGACAA | UUGUCAUAAAUUCCAUUUU | 999 | 1671 | Yes | No | No |
| 1000 | AAUGGAAUUUAUGACAAUA | UAUUGUCAUAAAUUCCAUU | 1001 | 1673 | Yes | No | No |
| 1002 | AUGGAAUUUAUGACAAUUA | UAAUUGUCAUAAAUUCCAU | 1003 | 1674 | Yes | No | No |
| 1004 | AAUUUAUGACAAUUAAUGA | UCAUUAAUUGUCAUAAAUU | 1005 | 1678 | Yes | No | No |
| 1006 | UUAUGACAAUUAAUGGAAA | UUUCCAUUAAUUGUCAUAA | 1007 | 1681 | Yes | No | No |
| 1008 | UAUGACAAUUAAUGGAACA | UGUUCCAUUAAUUGUCAUA | 1009 | 1682 | Yes | No | No |
| 1010 | AUGACAAUUAAUGGAACAA | UUGUUCCAUUAAUUGUCAU | 1011 | 1683 | Yes | No | No |
| 1012 | UGACAAUUAAUGGAACAAA | UUUGUUCCAUUAAUUGUCA | 1013 | 1684 | Yes | No | No |
| 1014 | GACAAUUAAUGGAACAACA | UGUUGUUCCAUUAAUUGUC | 1015 | 1685 | Yes | No | No |
| 1016 | ACAAUUAAUGGAACAACAA | UUGUUGUUCCAUUAAUUGU | 1017 | 1686 | Yes | No | No |
| 1018 | AAUGGAACAACAUUAAGGA | UCCUUAAUGUUGUUCCAUU | 1019 | 1692 | Yes | No | No |
| 1020 | GGAACAACAUUAAGGAAUA | UAUUCCUUAAUGUUGUUCC | 1021 | 1695 | Yes | No | No |
| 1022 | CAACAUUAAGGAAUCUGGA | UCCAGAUUCCUUAAUGUUG | 1023 | 1699 | Yes | No | No |
| 1024 | UAAGGAAUCUGGAAAUCCA | UGGAUUUCCAGAUUCCUUA | 1025 | 1705 | Yes | No | Yes |
| 1026 | GGAAUCUGGAAAUCCUACA | UGUAGGAUUUCCAGAUUCC | 1027 | 1708 | Yes | No | Yes |
| 1028 | GAAUCUGGAAAUCCUACAA | UUGUAGGAUUUCCAGAUUC | 1029 | 1709 | Yes | No | Yes |
| 1030 | UCUGGAAAUCCUACAGAAA | UUUCUGUAGGAUUUCCAGA | 1031 | 1712 | Yes | No | Yes |
| 1032 | CUGGAAAUCCUACAGAAUA | UAUUCUGUAGGAUUUCCAG | 1033 | 1713 | Yes | No | Yes |
| 1034 | UGGAAAUCCUACAGAAUCA | UGAUUCUGUAGGAUUUCCA | 1035 | 1714 | Yes | No | Yes |
| 1036 | GAAAUCCUACAGAAUCAGA | UCUGAUUCUGUAGGAUUUC | 1037 | 1716 | Yes | No | Yes |
| 1038 | AAUCCUACAGAAUCAGACA | UGUCUGAUUCUGUAGGAUU | 1039 | 1718 | Yes | No | Yes |
| 1040 | AUCCUACAGAAUCAGACUA | UAGUCUGAUUCUGUAGGAU | 1041 | 1719 | Yes | No | Yes |
| 1042 | UCCUACAGAAUCAGACUGA | UCAGUCUGAUUCUGUAGGA | 1043 | 1720 | Yes | No | Yes |
| 1044 | CCUACAGAAUCAGACUGAA | UUCAGUCUGAUUCUGUAGG | 1045 | 1721 | Yes | No | Yes |
| 1046 | CUACAGAAUCAGACUGAUA | UAUCAGUCUGAUUCUGUAG | 1047 | 1722 | Yes | No | Yes |
| 1048 | UACAGAAUCAGACUGAUAA | UUAUCAGUCUGAUUCUGUA | 1049 | 1723 | Yes | No | Yes |
| 1050 | ACAGAAUCAGACUGAUAUA | UAUAUCAGUCUGAUUCUGU | 1051 | 1724 | Yes | No | Yes |
| 1052 | CAGAAUCAGACUGAUAUGA | UCAUAUCAGUCUGAUUCUG | 1053 | 1725 | Yes | Yes | Yes |
| 1054 | UCAGACUGAUAUGAAAACA | UGUUUUCAUAUCAGUCUGA | 1055 | 1730 | Yes | No | No |
| 1056 | GACUGAUAUGAAAACCAAA | UUUGGUUUUCAUAUCAGUC | 1057 | 1733 | Yes | No | No |
| 1058 | ACUGAUAUGAAAACCAAAA | UUUUGGUUUUCAUAUCAGU | 1059 | 1734 | Yes | No | No |
| 1060 | CUGAUAUGAAAACCAAAGA | UCUUUGGUUUUCAUAUCAG | 1061 | 1735 | Yes | No | No |
| 1062 | GAUAUGAAAACCAAAGGAA | UUCCUUUGGUUUUCAUAUC | 1063 | 1737 | Yes | No | No |
| 1064 | GAAAACCAAAGGAAGUUUA | UAAACUUCCUUUGGUUUUC | 1065 | 1742 | Yes | No | No |
| 1066 | AAAACCAAAGGAAGUUUGA | UCAAACUUCCUUUGGUUUU | 1067 | 1743 | Yes | No | No |
| 1068 | AAACCAAAGGAAGUUUGCA | UGCAAACUUCCUUUGGUUU | 1069 | 1744 | Yes | No | No |
| 1070 | ACCAAAGGAAGUUUGCUGA | UCAGCAAACUUCCUUUGGU | 1071 | 1746 | Yes | No | No |
| 1072 | GGAAGUUUGCUGUGGGUUA | UAACCCACAGCAAACUUCC | 1073 | 1752 | Yes | No | No |
| 1074 | AGUUUGCUGUGGGUUUUAA | UUAAAACCCACAGCAAACU | 1075 | 1755 | Yes | No | No |
| 1076 | UUGCUGUGGGUUUUAGACA | UGUCUAAAACCCACAGCAA | 1077 | 1758 | Yes | No | No |
| 1078 | UGCUGUGGGUUUUAGACCA | UGGUCUAAAACCCACAGCA | 1079 | 1759 | Yes | No | No |
| 1080 | GCUGUGGGUUUUAGACCAA | UUGGUCUAAAACCCACAGC | 1081 | 1760 | Yes | No | No |
| 1082 | CUGUGGGUUUUAGACCACA | UGUGGUCUAAAACCCACAG | 1083 | 1761 | Yes | No | No |
| 1084 | UGGGUUUUAGACCACACUA | UAGUGUGGUCUAAAACCCA | 1085 | 1764 | Yes | Yes | Yes |
| 1086 | GGUUUUAGACCACACUAAA | UUUAGUGUGGUCUAAAACC | 1087 | 1766 | Yes | Yes | Yes |
| 1088 | GUUUUAGACCACACUAAAA | UUUUAGUGUGGUCUAAAAC | 1089 | 1767 | Yes | Yes | Yes |
| 1090 | UUUAGACCACACUAAAACA | UGUUUUAGUGUGGUCUAAA | 1091 | 1769 | Yes | Yes | Yes |
| 1092 | UUAGACCACACUAAAACUA | UAGUUUUAGUGUGGUCUAA | 1093 | 1770 | Yes | Yes | No |
| 1094 | UAGACCACACUAAAACUUA | UAAGUUUUAGUGUGGUCUA | 1095 | 1771 | Yes | Yes | No |
| 1096 | AGACCACACUAAAACUUCA | UGAAGUUUUAGUGUGGUCU | 1097 | 1772 | Yes | Yes | No |
| 1098 | CCACACUAAAACUUCAUUA | UAAUGAAGUUUUAGUGUGG | 1099 | 1775 | Yes | Yes | No |
| 1100 | CACUAAAACUUCAUUUGGA | UCCAAAUGAAGUUUUAGUG | 1101 | 1778 | Yes | Yes | No |
| 1102 | ACUAAAACUUCAUUUGGGA | UCCCAAAUGAAGUUUUAGU | 1103 | 1779 | Yes | Yes | No |
| 1104 | UAAAACUUCAUUUGGGAGA | UCUCCCAAAUGAAGUUUUA | 1105 | 1781 | Yes | Yes | No |
| 1106 | AUUUGGGAGACGGAAGUUA | UAACUUCCGUCUCCCAAAU | 1107 | 1790 | Yes | No | No |
| 1108 | UUGGGAGACGGAAGUUAAA | UUUAACUUCCGUCUCCCAA | 1109 | 1792 | Yes | No | No |
| 1110 | GGGAGACGGAAGUUAAAGA | UCUUUAACUUCCGUCUCCC | 1111 | 1794 | Yes | No | No |
| 1112 | GGAGACGGAAGUUAAAGAA | UUCUUUAACUUCCGUCUCC | 1113 | 1795 | Yes | No | No |
| 1114 | GACGGAAGUUAAAGAAGUA | UACUUCUUUAACUUCCGUC | 1115 | 1798 | Yes | No | No |
| 1116 | ACGGAAGUUAAAGAAGUGA | UCACUUCUUUAACUUCCGU | 1117 | 1799 | Yes | No | No |
| 1118 | CGGAAGUUAAAGAAGUGGA | UCCACUUCUUUAACUUCCG | 1119 | 1800 | Yes | No | No |
| 1120 | GUGACCCAGCCACUCCUUA | UAAGGAGUGGCUGGGUCAC | 1121 | 1818 | Yes | No | No |
| 1122 | UGACCCAGCCACUCCUUAA | UUAAGGAGUGGCUGGGUCA | 1123 | 1819 | Yes | No | No |
| 1124 | ACCCAGCCACUCCUUAAAA | UUUUAAGGAGUGGCUGGGU | 1125 | 1821 | Yes | No | No |
| 1126 | CCCAGCCACUCCUUAAAUA | UAUUUAAGGAGUGGCUGGG | 1127 | 1822 | Yes | No | No |
| 1128 | GCCACUCCUUAAAUUAAGA | UCUUAAUUUAAGGAGUGGC | 1129 | 1826 | Yes | No | No |
| 1130 | CACUCCUUAAAUUAAGGGA | UCCCUUAAUUUAAGGAGUG | 1131 | 1828 | Yes | No | No |
| 1132 | ACUCCUUAAAUUAAGGGAA | UUCCCUUAAUUUAAGGAGU | 1133 | 1829 | Yes | No | No |
| 1134 | CUCCUUAAAUUAAGGGAAA | UUUCCCUUAAUUUAAGGAG | 1135 | 1830 | Yes | No | No |
| 1136 | CCUUAAAUUAAGGGAAAUA | UAUUUCCCUUAAUUUAAGG | 1137 | 1832 | Yes | No | No |
| 1138 | UAAAUUAAGGGAAAUAAAA | UUUUAUUUCCCUUAAUUUA | 1139 | 1835 | Yes | Yes | No |
| 1140 | UUAAGGGAAAUAAAUGCCA | UGGCAUUUAUUUCCCUUAA | 1141 | 1839 | Yes | Yes | No |
| 1142 | AUAAAUGCCCGGCUUGAUA | UAUCAAGCCGGGCAUUUAU | 1143 | 1848 | Yes | No | No |
| 1144 | AAAUGCCCGGCUUGAUGCA | UGCAUCAAGCCGGGCAUUU | 1145 | 1850 | Yes | No | No |
| 1146 | AAUGCCCGGCUUGAUGCUA | UAGCAUCAAGCCGGGCAUU | 1147 | 1851 | Yes | No | No |
| 1148 | AUGCCCGGCUUGAUGCUGA | UCAGCAUCAAGCCGGGCAU | 1149 | 1852 | Yes | No | No |
| 1150 | UGCCCGGCUUGAUGCUGUA | UACAGCAUCAAGCCGGGCA | 1151 | 1853 | Yes | No | No |
| 1152 | GCCCGGCUUGAUGCUGUAA | UUACAGCAUCAAGCCGGGC | 1153 | 1854 | Yes | No | No |
| 1154 | CGGCUUGAUGCUGUAUCGA | UCGAUACAGCAUCAAGCCG | 1155 | 1857 | No | No | No |
| 1156 | GGCUUGAUGCUGUAUCGGA | UCCGAUACAGCAUCAAGCC | 1157 | 1858 | No | No | No |
| 1158 | GCUUGAUGCUGUAUCGGAA | UUCCGAUACAGCAUCAAGO | 1159 | 1859 | No | No | No |
| 1160 | UUGAUGCUGUAUCGGAAGA | UCUUCCGAUACAGCAUCAA | 1161 | 1861 | No | No | No |
| 1162 | UGAUGCUGUAUCGGAAGUA | UACUUCCGAUACAGCAUCA | 1163 | 1862 | No | No | No |
| 1164 | GAUGCUGUAUCGGAAGUUA | UAACUUCCGAUACAGCAUC | 1165 | 1863 | No | No | No |
| 1166 | AUGCUGUAUCGGAAGUUCA | UGAACUUCCGAUACAGCAU | 1167 | 1864 | No | No | No |
| 1168 | GCUGUAUCGGAAGUUCUCA | UGAGAACUUCCGAUACAGC | 1169 | 1866 | No | No | No |
| 1170 | CUGUAUCGGAAGUUCUCCA | UGGAGAACUUCCGAUACAG | 1171 | 1867 | No | No | No |
| 1172 | UGUAUCGGAAGUUCUCCAA | UUGGAGAACUUCCGAUACA | 1173 | 1868 | No | No | No |
| 1174 | GUAUCGGAAGUUCUCCAUA | UAUGGAGAACUUCCGAUAC | 1175 | 1869 | No | No | No |
| 1176 | AUCGGAAGUUCUCCAUUCA | UGAAUGGAGAACUUCCGAU | 1177 | 1871 | No | No | No |
| 1178 | UCGGAAGUUCUCCAUUCAA | UUGAAUGGAGAACUUCCGA | 1179 | 1872 | No | No | No |
| 1180 | CGGAAGUUCUCCAUUCAGA | UCUGAAUGGAGAACUUCCG | 1181 | 1873 | No | No | No |
| 1182 | AGUUCUCCAUUCAGAAUCA | UGAUUCUGAAUGGAGAACU | 1183 | 1877 | Yes | No | No |
| 1184 | GUUCUCCAUUCAGAAUCUA | UAGAUUCUGAAUGGAGAAC | 1185 | 1878 | Yes | No | No |
| 1186 | CUCCAUUCAGAAUCUAGUA | UACUAGAUUCUGAAUGGAG | 1187 | 1881 | Yes | No | No |
| 1188 | UCCAUUCAGAAUCUAGUGA | UCACUAGAUUCUGAAUGGA | 1189 | 1882 | Yes | No | No |
| 1190 | CCAUUCAGAAUCUAGUGUA | UACACUAGAUUCUGAAUGG | 1191 | 1883 | Yes | No | No |
| 1192 | CAUUCAGAAUCUAGUGUGA | UCACACUAGAUUCUGAAUG | 1193 | 1884 | Yes | No | NO |
| 1194 | AUUCAGAAUCUAGUGUGUA | UACACACUAGAUUCUGAAU | 1195 | 1885 | Yes | No | No |
| 1196 | UUCAGAAUCUAGUGUGUUA | UAACACACUAGAUUCUGAA | 1197 | 1886 | Yes | No | No |
| 1198 | AGAAUCUAGUGUGUUUGGA | UCCAAACACACUAGAUUCU | 1199 | 1889 | Yes | No | No |
| 1200 | GAAUCUAGUGUGUUUGGUA | UACCAAACACACUAGAUUC | 1201 | 1890 | Yes | No | No |
| 1202 | AAUCUAGUGUGUUUGGUCA | UGACCAAACACACUAGAUU | 1203 | 1891 | Yes | No | No |
| 1204 | AUCUAGUGUGUUUGGUCAA | UUGACCAAACACACUAGAU | 1205 | 1892 | Yes | No | No |
| 1206 | CUAGUGUGUUUGGUCAGAA | UUCUGACCAAACACACUAG | 1207 | 1894 | Yes | No | No |
| 1208 | UGUGUUUGGUCAGAUAGAA | UUCUAUCUGACCAAACACA | 1209 | 1898 | Yes | No | No |
| 1210 | GUGUUUGGUCAGAUAGAAA | UUUCUAUCUGACCAAACAC | 1211 | 1899 | Yes | No | No |
| 1212 | UGUUUGGUCAGAUAGAAAA | UUUUCUAUCUGACCAAACA | 1213 | 1900 | Yes | No | No |
| 1214 | UUUGGUCAGAUAGAAAAUA | UAUUUUCUAUCUGACCAAA | 1215 | 1902 | Yes | No | No |
| 1216 | UUGGUCAGAUAGAAAAUCA | UGAUUUUCUAUCUGACCAA | 1217 | 1903 | Yes | No | No |
| 1218 | GUCAGAUAGAAAAUCAUCA | UGAUGAUUUUCUAUCUGAC | 1219 | 1906 | Yes | No | No |
| 1220 | CAGAUAGAAAAUCAUCUAA | UUAGAUGAUUUUCUAUCUG | 1221 | 1908 | Yes | No | No |
| 1222 | AUAGAAAAUCAUCUACGUA | UACGUAGAUGAUUUUCUAU | 1223 | 1911 | Yes | No | No |
| 1224 | UAGAAAAUCAUCUACGUAA | UUACGUAGAUGAUUUUCUA | 1225 | 1912 | Yes | No | No |
| 1226 | AGAAAAUCAUCUACGUAAA | UUUACGUAGAUGAUUUUCU | 1227 | 1913 | Yes | No | No |
| 1228 | AAAAUCAUCUACGUAAAUA | UAUUUACGUAGAUGAUUUU | 1229 | 1915 | Yes | No | No |
| 1230 | AAUCAUCUACGUAAAUUGA | UCAAUUUACGUAGAUGAUU | 1231 | 1917 | Yes | No | No |
| 1232 | AUCAUCUACGUAAAUUGCA | UGCAAUUUACGUAGAUGAU | 1233 | 1918 | Yes | No | No |
| 1234 | CAUCUACGUAAAUUGCCCA | UGGGCAAUUUACGUAGAUG | 1235 | 1920 | No | No | No |
| 1236 | GUAAAUUGCCCGACAUAGA | UCUAUGUCGGGCAAUUUAC | 1237 | 1927 | No | No | No |
| 1238 | UAAAUUGCCCGACAUAGAA | UUCUAUGUCGGGCAAUUUA | 1239 | 1928 | No | No | No |
| 1240 | AAAUUGCCCGACAUAGAGA | UCUCUAUGUCGGGCAAUUU | 1241 | 1929 | No | No | No |
| 1242 | AUUGCCCGACAUAGAGAGA | UCUCUCUAUGUCGGGCAAU | 1243 | 1931 | No | No | No |
| 1244 | UUGCCCGACAUAGAGAGGA | UCCUCUCUAUGUCGGGCAA | 1245 | 1932 | No | No | No |
| 1246 | AUAGAGAGGGGACUCUGUA | UACAGAGUCCCCUCUCUAU | 1247 | 1941 | No | No | No |
| 1248 | AGAGGGGACUCUGUAGCAA | UUGCUACAGAGUCCCCUCU | 1249 | 1945 | No | No | No |
| 1250 | GGACUCUGUAGCAUUUAUA | UAUAAAUGCUACAGAGUCC | 1251 | 1950 | Yes | No | No |
| 1252 | GACUCUGUAGCAUUUAUCA | UGAUAAAUGCUACAGAGUC | 1253 | 1951 | Yes | No | No |
| 1254 | CUCUGUAGCAUUUAUCACA | UGUGAUAAAUGCUACAGAG | 1255 | 1953 | Yes | No | No |
| 1256 | AAAAUGUUCUACCCAAGAA | UUCUUGGGUAGAACAUUUU | 1257 | 1973 | Yes | No | No |
| 1258 | AAUGUUCUACCCAAGAGUA | UACUCUUGGGUAGAACAUU | 1259 | 1975 | Yes | No | No |
| 1260 | AUGUUCUACCCAAGAGUUA | UAACUCUUGGGUAGAACAU | 1261 | 1976 | Yes | No | No |
| 1262 | UGUUCUACCCAAGAGUUCA | UGAACUCUUGGGUAGAACA | 1263 | 1977 | Yes | No | No |
| 1264 | UUCUACCCAAGAGUUCUUA | UAAGAACUCUUGGGUAGAA | 1265 | 1979 | Yes | No | No |
| 1266 | UCUACCCAAGAGUUCUUCA | UGAAGAACUCUUGGGUAGA | 1267 | 1980 | Yes | Yes | No |
| 1268 | UACCCAAGAGUUCUUCUUA | UAAGAAGAACUCUUGGGUA | 1269 | 1982 | Yes | Yes | No |
| 1270 | ACCCAAGAGUUCUUCUUGA | UCAAGAAGAACUCUUGGGU | 1271 | 1983 | Yes | Yes | No |
| 1272 | GAGUUCUUCUUGAUUGUCA | UGACAAUCAAGAAGAACUC | 1273 | 1989 | Yes | No | No |
| 1274 | UCUUGAUUGUCAAAACUUA | UAAGUUUUGACAAUCAAGA | 1275 | 1996 | No | No | No |
| 1276 | UUGAUUGUCAAAACUUUAA | UUAAAGUUUUGACAAUCAA | 1277 | 1998 | No | No | No |
| 1278 | UGAUUGUCAAAACUUUAUA | UAUAAAGUUUUGACAAUCA | 1279 | 1999 | No | No | No |
| 1280 | UUGUCAAAACUUUAUAUCA | UGAUAUAAAGUUUUGACAA | 1281 | 2002 | No | No | No |
| 1282 | UGUCAAAACUUUAUAUCAA | UUGAUAUAAAGUUUUGACA | 1283 | 2003 | No | No | No |
| 1284 | CAAAACUUUAUAUCACCUA | UAGGUGAUAUAAAGUUUUG | 1285 | 2006 | No | No | No |
| 1286 | AAAACUUUAUAUCACCUAA | UUAGGUGAUAUAAAGUUUU | 1287 | 2007 | No | No | No |
| 1288 | AAACUUUAUAUCACCUAAA | UUUAGGUGAUAUAAAGUUU | 1289 | 2008 | No | No | No |
| 1290 | ACUUUAUAUCACCUAAAGA | UCUUUAGGUGAUAUAAAGU | 1291 | 2010 | No | No | No |
| 1292 | CUUUAUAUCACCUAAAGUA | UACUUUAGGUGAUAUAAAG | 1293 | 2011 | No | No | No |
| 1294 | UUAUAUCACCUAAAGUCAA | UUGACUUUAGGUGAUAUAA | 1295 | 2013 | Yes | No | No |
| 1296 | UAUAUCACCUAAAGUCAGA | UCUGACUUUAGGUGAUAUA | 1297 | 2014 | Yes | No | No |
| 1298 | UAUCACCUAAAGUCAGAAA | UUUCUGACUUUAGGUGAUA | 1299 | 2016 | Yes | No | No |
| 1300 | AUCACCUAAAGUCAGAAUA | UAUUCUGACUUUAGGUGAU | 1301 | 2017 | Yes | No | No |
| 1302 | UCACCUAAAGUCAGAAUUA | UAAUUCUGACUUUAGGUGA | 1303 | 2018 | Yes | No | No |
| 1304 | GUCAGAAUUUCAAGCAAUA | UAUUGCUUGAAAUUCUGAC | 1305 | 2027 | Yes | No | No |
| 1306 | AGAAUUUCAAGCAAUAAUA | UAUUAUUGCUUGAAAUUCU | 1307 | 2030 | Yes | No | No |
| 1308 | AUUUCAAGCAAUAAUACCA | UGGUAUUAUUGCUUGAAAU | 1309 | 2033 | Yes | No | No |
| 1310 | UUUCAAGCAAUAAUACCUA | UAGGUAUUAUUGCUUGAAA | 1311 | 2034 | Yes | No | No |
| 1312 | UCAAGCAAUAAUACCUGCA | UGCAGGUAUUAUUGCUUGA | 1313 | 2036 | Yes | No | No |
| 1314 | GCAAUAAUACCUGCUGUUA | UAACAGCAGGUAUUAUUGC | 1315 | 2040 | Yes | No | No |
| 1316 | UAAUACCUGCUGUUAAUUA | UAAUUAACAGCAGGUAUUA | 1317 | 2044 | Yes | No | No |
| 1318 | AUACCUGCUGUUAAUUCCA | UGGAAUUAACAGCAGGUAU | 1319 | 2046 | Yes | No | No |
| 1320 | UGCUGUUAAUUCCCACAUA | UAUGUGGGAAUUAACAGCA | 1321 | 2051 | No | No | No |
| 1322 | GCUGUUAAUUCCCACAUUA | UAAUGUGGGAAUUAACAGC | 1323 | 2052 | No | No | No |
| 1324 | CUGUUAAUUCCCACAUUCA | UGAAUGUGGGAAUUAACAG | 1325 | 2053 | No | No | No |
| 1326 | UGUUAAUUCCCACAUUCAA | UUGAAUGUGGGAAUUAACA | 1327 | 2054 | No | No | No |
| 1328 | UUAAUUCCCACAUUCAGUA | UACUGAAUGUGGGAAUUAA | 1329 | 2056 | No | No | No |
| 1330 | UAAUUCCCACAUUCAGUCA | UGACUGAAUGUGGGAAUUA | 1331 | 2057 | No | No | No |
| 1332 | UUCCCACAUUCAGUCAGAA | UUCUGACUGAAUGUGGGAA | 1333 | 2060 | No | No | No |
| 1334 | UCCCACAUUCAGUCAGACA | UGUCUGACUGAAUGUGGGA | 1335 | 2061 | No | No | No |
| 1336 | CCCACAUUCAGUCAGACUA | UAGUCUGACUGAAUGUGGG | 1337 | 2062 | No | No | No |
| 1338 | CACAUUCAGUCAGACUUGA | UCAAGUCUGACUGAAUGUG | 1339 | 2064 | No | No | No |
| 1340 | ACAUUCAGUCAGACUUGCA | UGCAAGUCUGACUGAAUGU | 1341 | 2065 | No | No | No |
| 1342 | CAUUCAGUCAGACUUGCUA | UAGCAAGUCUGACUGAAUG | 1343 | 2066 | No | No | No |
| 1344 | AUUCAGUCAGACUUGCUCA | UGAGCAAGUCUGACUGAAU | 1345 | 2067 | No | No | No |
| 1346 | ACUUGCUCCGGACCGUUAA | UUAACGGUCCGGAGCAAGU | 1347 | 2077 | No | No | No |
| 1348 | CUUGCUCCGGACCGUUAUA | UAUAACGGUCCGGAGCAAG | 1349 | 2078 | No | No | No |
| 1350 | UUGCUCCGGACCGUUAUUA | UAAUAACGGUCCGGAGCAA | 1351 | 2079 | No | No | No |
| 1352 | GCUCCGGACCGUUAUUUUA | UAAAAUAACGGUCCGGAGC | 1353 | 2081 | No | No | No |
| 1354 | CUCCGGACCGUUAUUUUAA | UUAAAAUAACGGUCCGGAG | 1355 | 2082 | No | No | No |
| 1356 | UCCGGACCGUUAUUUUAGA | UCUAAAAUAACGGUCCGGA | 1357 | 2083 | No | No | No |
| 1358 | GGACCGUUAUUUUAGAAAA | UUUUCUAAAAUAACGGUCC | 1359 | 2086 | No | No | No |
| 1360 | GACCGUUAUUUUAGAAAUA | UAUUUCUAAAAUAACGGUC | 1361 | 2087 | No | No | No |
| 1362 | ACCGUUAUUUUAGAAAUUA | UAAUUUCUAAAAUAACGGU | 1363 | 2088 | Yes | No | No |
| 1364 | CCGUUAUUUUAGAAAUUCA | UGAAUUUCUAAAAUAACGG | 1365 | 2089 | Yes | No | No |
| 1366 | CGUUAUUUUAGAAAUUCCA | UGGAAUUUCUAAAAUAACG | 1367 | 2090 | Yes | No | No |
| 1368 | UUUAGAAAUUCCUGAACUA | UAGUUCAGGAAUUUCUAAA | 1369 | 2096 | Yes | No | No |
| 1370 | UUAGAAAUUCCUGAACUCA | UGAGUUCAGGAAUUUCUAA | 1371 | 2097 | Yes | No | No |
| 1372 | GAAAUUCCUGAACUCCUCA | UGAGGAGUUCAGGAAUUUC | 1373 | 2100 | Yes | No | No |
| 1374 | AAAUUCCUGAACUCCUCAA | UUGAGGAGUUCAGGAAUUU | 1375 | 2101 | Yes | No | No |
| 1376 | CCUGAACUCCUCAGUCCAA | UUGGACUGAGGAGUUCAGG | 1377 | 2106 | Yes | No | No |
| 1378 | UGAACUCCUCAGUCCAGUA | UACUGGACUGAGGAGUUCA | 1379 | 2108 | Yes | No | No |
| 1380 | CUCAGUCCAGUGGAGCAUA | UAUGCUCCACUGGACUGAG | 1381 | 2115 | Yes | No | No |
| 1382 | UCAGUCCAGUGGAGCAUUA | UAAUGCUCCACUGGACUGA | 1383 | 2116 | Yes | No | No |
| 1384 | GUCCAGUGGAGCAUUACUA | UAGUAAUGCUCCACUGGAC | 1385 | 2119 | Yes | No | No |
| 1386 | UCCAGUGGAGCAUUACUUA | UAAGUAAUGCUCCACUGGA | 1387 | 2120 | Yes | No | No |
| 1388 | AGUGGAGCAUUACUUAAAA | UUUUAAGUAAUGCUCCACU | 1389 | 2123 | Yes | No | No |
| 1390 | GUGGAGCAUUACUUAAAGA | UCUUUAAGUAAUGCUCCAC | 1391 | 2124 | Yes | No | No |
| 1392 | GGAGCAUUACUUAAAGAUA | UAUCUUUAAGUAAUGCUCC | 1393 | 2126 | Yes | No | No |
| 1394 | GAGCAUUACUUAAAGAUAA | UUAUCUUUAAGUAAUGCUC | 1395 | 2127 | Yes | No | No |
| 1396 | AGCAUUACUUAAAGAUACA | UGUAUCUUUAAGUAAUGCU | 1397 | 2128 | Yes | No | No |
| 1398 | CAUUACUUAAAGAUACUCA | UGAGUAUCUUUAAGUAAUG | 1399 | 2130 | Yes | No | No |
| 1400 | UACUUAAAGAUACUCAAUA | UAUUGAGUAUCUUUAAGUA | 1401 | 2133 | Yes | No | No |
| 1402 | CUUAAAGAUACUCAAUGAA | UUCAUUGAGUAUCUUUAAG | 1403 | 2135 | Yes | No | No |
| 1404 | UUAAAGAUACUCAAUGAAA | UUUCAUUGAGUAUCUUUAA | 1405 | 2136 | Yes | No | No |
| 1406 | UAAAGAUACUCAAUGAACA | UGUUCAUUGAGUAUCUUUA | 1407 | 2137 | Yes | No | No |
| 1408 | GAUACUCAAUGAACAAGCA | UGCUUGUUCAUUGAGUAUC | 1409 | 2141 | Yes | No | No |
| 1410 | AUGAACAAGCUGCCAAAGA | UCUUUGGCAGCUUGUUCAU | 1411 | 2149 | Yes | No | Yes |
| 1412 | UGAACAAGCUGCCAAAGUA | UACUUUGGCAGCUUGUUCA | 1413 | 2150 | Yes | No | No |
| 1414 | GAACAAGCUGCCAAAGUUA | UAACUUUGGCAGCUUGUUC | 1415 | 2151 | Yes | No | No |
| 1416 | ACAAGCUGCCAAAGUUGGA | UCCAACUUUGGCAGCUUGU | 1417 | 2153 | Yes | No | No |
| 1418 | CUGCCAAAGUUGGGGAUAA | UUAUCCCCAACUUUGGCAG | 1419 | 2158 | Yes | V | No |
| 1420 | UGCCAAAGUUGGGGAUAAA | UUUAUCCCCAACUUUGGCA | 1421 | 2159 | Yes | No | No |
| 1422 | AAGUUGGGGAUAAAACUGA | UCAGUUUUAUCCCCAACUU | 1423 | 2164 | Yes | No | No |
| 1424 | GUUGGGGAUAAAACUGAAA | UUUCAGUUUUAUCCCCAAC | 1425 | 2166 | Yes | No | No |
| 1426 | UUGGGGAUAAAACUGAAUA | UAUUCAGUUUUAUCCCCAA | 1427 | 2167 | Yes | No | No |
| 1428 | GGGGAUAAAACUGAAUUAA | UUAAUUCAGUUUUAUCCCC | 1429 | 2169 | Yes | No | No |
| 1430 | GGGAUAAAACUGAAUUAUA | UAUAAUUCAGUUUUAUCCC | 1431 | 2170 | Yes | No | No |
| 1432 | GGAUAAAACUGAAUUAUUA | UAAUAAUUCAGUUUUAUCC | 1433 | 2171 | Yes | No | No |
| 1434 | CUGAAUUAUUUAAAGACCA | UGGUCUUUAAAUAAUUCAG | 1435 | 2179 | Yes | No | No |
| 1436 | UAUUUAAAGACCUUUCUGA | UCAGAAAGGUCUUUAAAUA | 1437 | 2185 | Yes | No | No |
| 1438 | AUUUAAAGACCUUUCUGAA | UUCAGAAAGGUCUUUAAAU | 1439 | 2186 | Yes | No | No |
| 1440 | UAAAGACCUUUCUGACUUA | UAAGUCAGAAAGGUCUUUA | 1441 | 2189 | Yes | No | No |
| 1442 | AAGACCUUUCUGACUUCCA | UGGAAGUCAGAAAGGUCUU | 1443 | 2191 | Yes | No | No |
| 1444 | GACCUUUCUGACUUCCCUA | UAGGGAAGUCAGAAAGGUC | 1445 | 2193 | Yes | No | No |
| 1446 | ACCUUUCUGACUUCCCUUA | UAAGGGAAGUCAGAAAGGU | 1447 | 2194 | Yes | No | No |
| 1448 | UUCUGACUUCCCUUUAAUA | UAUUAAAGGGAAGUCAGAA | 1449 | 2198 | Yes | No | No |
| 1450 | UCUGACUUCCCUUUAAUAA | UUAUUAAAGGGAAGUCAGA | 1451 | 2199 | Yes | Yes | Yes |
| 1452 | UGACUUCCCUUUAAUAAAA | UUUUAUUAAAGGGAAGUCA | 1453 | 2201 | Yes | Yes | Yes |
| 1454 | AGAGGAAGGAUGAAAUUCA | UGAAUUUCAUCCUUCCUCU | 1455 | 2221 | Yes | No | No |
| 1456 | GGAUGAAAUUCAAGGUGUA | UACACCUUGAAUUUCAUCC | 1457 | 2228 | Yes | No | No |
| 1458 | UGAAAUUCAAGGUGUUAUA | UAUAACACCUUGAAUUUCA | 1459 | 2231 | No | No | No |
| 1460 | GAAAUUCAAGGUGUUAUUA | UAAUAACACCUUGAAUUUC | 1461 | 2232 | No | No | No |
| 1462 | AAUUCAAGGUGUUAUUGAA | UUCAAUAACACCUUGAAUU | 1463 | 2234 | No | No | No |
| 1464 | AUUCAAGGUGUUAUUGACA | UGUCAAUAACACCUUGAAU | 1465 | 2235 | No | No | No |
| 1466 | UUCAAGGUGUUAUUGACGA | UCGUCAAUAACACCUUGAA | 1467 | 2236 | No | No | No |
| 1468 | CAAGGUGUUAUUGACGAGA | UCUCGUCAAUAACACCUUG | 1469 | 2238 | No | No | No |
| 1470 | AAGGUGUUAUUGACGAGAA | UUCUCGUCAAUAACACCUU | 1471 | 2239 | No | No | No |
| 1472 | GGUGUUAUUGACGAGAUCA | UGAUCUCGUCAAUAACACC | 1473 | 2241 | No | No | No |
| 1474 | GUUAUUGACGAGAUCCGAA | UUCGGAUCUCGUCAAUAAC | 1475 | 2244 | No | No | No |
| 1476 | UUAUUGACGAGAUCCGAAA | UUUCGGAUCUCGUCAAUAA | 1477 | 2245 | No | No | No |
| 1478 | UAUUGACGAGAUCCGAAUA | UAUUCGGAUCUCGUCAAUA | 1479 | 2246 | No | No | No |
| 1480 | AUUGACGAGAUCCGAAUGA | UCAUUCGGAUCUCGUCAAU | 1481 | 2247 | No | No | No |
| 1482 | UGACGAGAUCCGAAUGCAA | UUGCAUUCGGAUCUCGUCA | 1483 | 2249 | No | No | No |
| 1484 | GACGAGAUCCGAAUGCAUA | UAUGCAUUCGGAUCUCGUC | 1485 | 2250 | No | No | No |
| 1486 | ACGAGAUCCGAAUGCAUUA | UAAUGCAUUCGGAUCUCGU | 1487 | 2251 | No | No | No |
| 1488 | CGAGAUCCGAAUGCAUUUA | UAAAUGCAUUCGGAUCUCG | 1489 | 2252 | No | No | No |
| 1490 | GAGAUCCGAAUGCAUUUGA | UCAAAUGCAUUCGGAUCUC | 1491 | 2253 | No | No | No |
| 1492 | AGAUCCGAAUGCAUUUGCA | UGCAAAUGCAUUCGGAUCU | 1493 | 2254 | Yes | No | No |
| 1494 | GAUCCGAAUGCAUUUGCAA | UUGCAAAUGCAUUCGGAUC | 1495 | 2255 | Yes | No | No |
| 1496 | UCCGAAUGCAUUUGCAAGA | UCUUGCAAAUGCAUUCGGA | 1497 | 2257 | Yes | No | No |
| 1498 | CCGAAUGCAUUUGCAAGAA | UUCUUGCAAAUGCAUUCGG | 1499 | 2258 | Yes | No | No |
| 1500 | GCAUUUGCAAGAAAUACGA | UCGUAUUUCUUGCAAAUGC | 1501 | 2264 | Yes | No | No |
| 1502 | AAAAUCCUUCUGCACAAUA | UAUUGUGCAGAAGGAUUUU | 1503 | 2293 | Yes | No | No |
| 1504 | AAAUCCUUCUGCACAAUAA | UUAUUGUGCAGAAGGAUUU | 1505 | 2294 | Yes | No | No |
| 1506 | AUCCUUCUGCACAAUAUGA | UCAUAUUGUGCAGAAGGAU | 1507 | 2296 | Yes | No | No |
| 1508 | CUUCUGCACAAUAUGUGAA | UUCACAUAUUGUGCAGAAG | 1509 | 2299 | Yes | No | No |
| 1510 | UCUGCACAAUAUGUGACAA | UUGUCACAUAUUGUGCAGA | 1511 | 2301 | Yes | No | No |
| 1512 | UGCACAAUAUGUGACAGUA | UACUGUCACAUAUUGUGCA | 1513 | 2303 | Yes | No | No |
| 1514 | GCACAAUAUGUGACAGUAA | UUACUGUCACAUAUUGUGC | 1515 | 2304 | Yes | No | No |
| 1516 | UAUGUGACAGUAUCAGGAA | UUCCUGAUACUGUCACAUA | 1517 | 2310 | Yes | No | No |
| 1518 | AUGUGACAGUAUCAGGACA | UGUCCUGAUACUGUCACAU | 1519 | 2311 | Yes | No | No |
| 1520 | GUAUCAGGACAGGAGUUUA | UAAACUCCUGUCCUGAUAC | 1521 | 2319 | Yes | No | No |
| 1522 | UAUCAGGACAGGAGUUUAA | UUAAACUCCUGUCCUGAUA | 1523 | 2320 | Yes | No | No |
| 1524 | CAGGACAGGAGUUUAUGAA | UUCAUAAACUCCUGUCCUG | 1525 | 2323 | Yes | No | No |
| 1526 | AGGACAGGAGUUUAUGAUA | UAUCAUAAACUCCUGUCCU | 1527 | 2324 | Yes | No | No |
| 1528 | GGACAGGAGUUUAUGAUAA | UUAUCAUAAACUCCUGUCC | 1529 | 2325 | No | No | No |
| 1530 | UUAUGAUAGAAAUAAAGAA | UUCUUUAUUUCUAUCAUAA | 1531 | 2335 | No | No | No |
| 1532 | GAAAUAAAGAACUCUGCUA | UAGCAGAGUUCUUUAUUUC | 1533 | 2343 | Yes | No | No |
| 1534 | AAUAAAGAACUCUGCUGUA | UACAGCAGAGUUCUUUAUU | 1535 | 2345 | Yes | No | No |
| 1536 | AUAAAGAACUCUGCUGUAA | UUACAGCAGAGUUCUUUAU | 1537 | 2346 | Yes | No | No |
| 1538 | UAAAGAACUCUGCUGUAUA | UAUACAGCAGAGUUCUUUA | 1539 | 2347 | Yes | No | No |
| 1540 | AGAACUCUGCUGUAUCUUA | UAAGAUACAGCAGAGUUCU | 1541 | 2350 | Yes | No | No |
| 1542 | GAACUCUGCUGUAUCUUGA | UCAAGAUACAGCAGAGUUC | 1543 | 2351 | Yes | No | No |
| 1544 | ACUCUGCUGUAUCUUGUAA | UUACAAGAUACAGCAGAGU | 1545 | 2353 | Yes | No | No |
| 1546 | CUCUGCUGUAUCUUGUAUA | UAUACAAGAUACAGCAGAG | 1547 | 2354 | Yes | No | No |
| 1548 | UGCUGUAUCUUGUAUACCA | UGGUAUACAAGAUACAGCA | 1549 | 2357 | Yes | No | No |
| 1550 | GCUGUAUCUUGUAUACCAA | UUGGUAUACAAGAUACAGC | 1551 | 2358 | Yes | No | No |
| 1552 | GUAUCUUGUAUACCAACUA | UAGUUGGUAUACAAGAUAC | 1553 | 2361 | Yes | No | No |
| 1554 | UAUCUUGUAUACCAACUGA | UCAGUUGGUAUACAAGAUA | 1555 | 2362 | Yes | No | No |
| 1556 | UCUUGUAUACCAACUGAUA | UAUCAGUUGGUAUACAAGA | 1557 | 2364 | Yes | No | No |
| 1558 | UGUAUACCAACUGAUUGGA | UCCAAUCAGUUGGUAUACA | 1559 | 2367 | Yes | No | No |
| 1560 | UAUACCAACUGAUUGGGUA | UACCCAAUCAGUUGGUAUA | 1561 | 2369 | Yes | No | No |
| 1562 | AUACCAACUGAUUGGGUAA | UUACCCAAUCAGUUGGUAU | 1563 | 2370 | Yes | No | No |
| 1564 | ACCAACUGAUUGGGUAAAA | UUUUACCCAAUCAGUUGGU | 1565 | 2372 | Yes | No | No |
| 1566 | CCAACUGAUUGGGUAAAGA | UCUUUACCCAAUCAGUUGG | 1567 | 2373 | Yes | No | No |
| 1568 | CAACUGAUUGGGUAAAGGA | UCCUUUACCCAAUCAGUUG | 1569 | 2374 | Yes | No | No |
| 1570 | AACUGAUUGGGUAAAGGUA | UACCUUUACCCAAUCAGUU | 1571 | 2375 | Yes | No | No |
| 1572 | CUGAUUGGGUAAAGGUUGA | UCAACCUUUACCCAAUCAG | 1573 | 2377 | Yes | No | No |
| 1574 | UGAUUGGGUAAAGGUUGGA | UCCAACCUUUACCCAAUCA | 1575 | 2378 | Yes | No | No |
| 1576 | GAUUGGGUAAAGGUUGGAA | UUCCAACCUUUACCCAAUC | 1577 | 2379 | Yes | No | No |
| 1578 | AUUGGGUAAAGGUUGGAAA | UUUCCAACCUUUACCCAAU | 1579 | 2380 | Yes | No | No |
| 1580 | UGGGUAAAGGUUGGAAGCA | UGCUUCCAACCUUUACCCA | 1581 | 2382 | Yes | No | No |
| 1582 | GUAAAGGUUGGAAGCACAA | UUGUGCUUCCAACCUUUAC | 1583 | 2385 | Yes | No | No |
| 1584 | GUUGGAAGCACAAAAGCUA | UAGCUUUUGUGCUUCCAAC | 1585 | 2391 | Yes | Yes | Yes |
| 1586 | UUGGAAGCACAAAAGCUGA | UCAGCUUUUGUGCUUCCAA | 1587 | 2392 | Yes | Yes | Yes |
| 1588 | UGGAAGCACAAAAGCUGUA | UACAGCUUUUGUGCUUCCA | 1589 | 2393 | Yes | Yes | Yes |
| 1590 | GGAAGCACAAAAGCUGUGA | UCACAGCUUUUGUGCUUCC | 1591 | 2394 | Yes | Yes | Yes |
| 1592 | GAAGCACAAAAGCUGUGAA | UUCACAGCUUUUGUGCUUC | 1593 | 2395 | Yes | Yes | Yes |
| 1594 | AGCUGUGAGCCGCUUUCAA | UUGAAAGCGGCUCACAGCU | 1595 | 2405 | No | Yes | Yes |
| 1596 | UGUGAGCCGCUUUCACUCA | UGAGUGAAAGCGGCUCACA | 1597 | 2408 | No | No | Yes |
| 1598 | GUGAGCCGCUUUCACUCUA | UAGAGUGAAAGCGGCUCAC | 1599 | 2409 | No | No | Yes |
| 1600 | AGCCGCUUUCACUCUCCUA | UAGGAGAGUGAAAGCGGCU | 1601 | 2412 | No | No | Yes |
| 1602 | GCCGCUUUCACUCUCCUUA | UAAGGAGAGUGAAAGCGGC | 1603 | 2413 | No | No | Yes |
| 1604 | GCUUUCACUCUCCUUUUAA | UUAAAAGGAGAGUGAAAGC | 1605 | 2416 | No | No | No |
| 1606 | CUUUCACUCUCCUUUUAUA | UAUAAAAGGAGAGUGAAAG | 1607 | 2417 | No | No | No |
| 1608 | UUUCACUCUCCUUUUAUUA | UAAUAAAAGGAGAGUGAAA | 1609 | 2418 | No | No | No |
| 1610 | CACUCUCCUUUUAUUGUAA | UUACAAUAAAAGGAGAGUG | 1611 | 2421 | No | No | No |
| 1612 | ACUCUCCUUUUAUUGUAGA | UCUACAAUAAAAGGAGAGU | 1613 | 2422 | No | No | No |
| 1614 | CUUUUAUUGUAGAAAAUUA | UAAUUUUCUACAAUAAAAG | 1615 | 2428 | No | No | No |
| 1616 | UUUAUUGUAGAAAAUUACA | UGUAAUUUUCUACAAUAAA | 1617 | 2430 | No | No | No |
| 1618 | AUUGUAGAAAAUUACAGAA | UUCUGUAAUUUUCUACAAU | 1619 | 2433 | No | No | No |
| 1620 | GUAGAAAAUUACAGACAUA | UAUGUCUGUAAUUUUCUAC | 1621 | 2436 | Yes | No | No |
| 1622 | AGAAAAUUACAGACAUCUA | UAGAUGUCUGUAAUUUUCU | 1623 | 2438 | Yes | No | No |
| 1624 | GAAAAUUACAGACAUCUGA | UCAGAUGUCUGUAAUUUUC | 1625 | 2439 | Yes | No | No |
| 1626 | UUACAGACAUCUGAAUCAA | UUGAUUCAGAUGUCUGUAA | 1627 | 2444 | Yes | No | No |
| 1628 | AGACAUCUGAAUCAGCUCA | UGAGCUGAUUCAGAUGUCU | 1629 | 2448 | No | No | No |
| 1630 | CGGGAGCAGCUAGUCCUUA | UAAGGACUAGCUGCUCCCG | 1631 | 2466 | Yes | Yes | Yes |
| 1632 | GGGAGCAGCUAGUCCUUGA | UCAAGGACUAGCUGCUCCC | 1633 | 2467 | Yes | Yes | Yes |
| 1634 | GGAGCAGCUAGUCCUUGAA | UUCAAGGACUAGCUGCUCC | 1635 | 2468 | Yes | Yes | Yes |
| 1636 | GAGCAGCUAGUCCUUGACA | UGUCAAGGACUAGCUGCUC | 1637 | 2469 | Yes | Yes | Yes |
| 1638 | AGCAGCUAGUCCUUGACUA | UAGUCAAGGACUAGCUGCU | 1639 | 2470 | Yes | Yes | Yes |
| 1640 | CAGCUAGUCCUUGACUGCA | UGCAGUCAAGGACUAGCUG | 1641 | 2472 | Yes | Yes | Yes |
| 1642 | AGCUAGUCCUUGACUGCAA | UUGCAGUCAAGGACUAGCU | 1643 | 2473 | Yes | Yes | Yes |
| 1644 | CCUUGACUGCAGUGCUGAA | UUCAGCACUGCAGUCAAGG | 1645 | 2480 | Yes | No | No |
| 1646 | UGACUGCAGUGCUGAAUGA | UCAUUCAGCACUGCAGUCA | 1647 | 2483 | Yes | No | No |
| 1648 | ACUGCAGUGCUGAAUGGCA | UGCCAUUCAGCACUGCAGU | 1649 | 2485 | Yes | No | No |
| 1650 | CUGCAGUGCUGAAUGGCUA | UAGCCAUUCAGCACUGCAG | 1651 | 2486 | Yes | No | No |
| 1652 | UGCAGUGCUGAAUGGCUUA | UAAGCCAUUCAGCACUGCA | 1653 | 2487 | Yes | No | No |
| 1654 | GCAGUGCUGAAUGGCUUGA | UCAAGCCAUUCAGCACUGC | 1655 | 2488 | Yes | No | No |
| 1656 | GAAUGGCUUGAUUUUCUAA | UUAGAAAAUCAAGCCAUUC | 1657 | 2496 | Yes | No | No |
| 1658 | AAUGGCUUGAUUUUCUAGA | UCUAGAAAAUCAAGCCAUU | 1659 | 2497 | Yes | No | No |
| 1660 | AUGGCUUGAUUUUCUAGAA | UUCUAGAAAAUCAAGCCAU | 1661 | 2498 | Yes | No | No |
| 1662 | UGGCUUGAUUUUCUAGAGA | UCUCUAGAAAAUCAAGCCA | 1663 | 2499 | Yes | No | No |
| 1664 | GAUUUUCUAGAGAAAUUCA | UGAAUUUCUCUAGAAAAUC | 1665 | 2505 | Yes | No | No |
| 1666 | UUUCUAGAGAAAUUCAGUA | UACUGAAUUUCUCUAGAAA | 1667 | 2508 | Yes | No | No |
| 1668 | UUCUAGAGAAAUUCAGUGA | UCACUGAAUUUCUCUAGAA | 1669 | 2509 | Yes | No | No |
| 1670 | UCUAGAGAAAUUCAGUGAA | UUCACUGAAUUUCUCUAGA | 1671 | 2510 | Yes | No | No |
| 1672 | UAGAGAAAUUCAGUGAACA | UGUUCACUGAAUUUCUCUA | 1673 | 2512 | Yes | No | No |
| 1674 | AAAUUCAGUGAACAUUAUA | UAUAAUGUUCACUGAAUUU | 1675 | 2517 | Yes | No | No |
| 1676 | AAUUCAGUGAACAUUAUCA | UGAUAAUGUUCACUGAAUU | 1677 | 2518 | Yes | No | No |
| 1678 | AUUCAGUGAACAUUAUCAA | UUGAUAAUGUUCACUGAAU | 1679 | 2519 | Yes | No | No |
| 1680 | GUGAACAUUAUCACUCCUA | UAGGAGUGAUAAUGUUCAC | 1681 | 2524 | No | No | No |
| 1682 | UGAACAUUAUCACUCCUUA | UAAGGAGUGAUAAUGUUCA | 1683 | 2525 | No | No | No |
| 1684 | GAACAUUAUCACUCCUUGA | UCAAGGAGUGAUAAUGUUC | 1685 | 2526 | No | No | No |
| 1686 | ACAUUAUCACUCCUUGUGA | UCACAAGGAGUGAUAAUGU | 1687 | 2528 | No | No | No |
| 1688 | AUCACUCCUUGUGUAAAGA | UCUUUACACAAGGAGUGAU | 1689 | 2533 | No | No | No |
| 1690 | ACUCCUUGUGUAAAGCAGA | UCUGCUUUACACAAGGAGU | 1691 | 2536 | No | No | No |
| 1692 | UUGUGUAAAGCAGUGCAUA | UAUGCACUGCUUUACACAA | 1693 | 2541 | Yes | No | No |
| 1694 | UAAAGCAGUGCAUCACCUA | UAGGUGAUGCACUGCUUUA | 1695 | 2546 | Yes | No | No |
| 1696 | AAAGCAGUGCAUCACCUAA | UUAGGUGAUGCACUGCUUU | 1697 | 2547 | Yes | No | No |
| 1698 | GUGCAUCACCUAGCAACUA | UAGUUGCUAGGUGAUGCAC | 1699 | 2553 | Yes | No | No |
| 1700 | GCAUCACCUAGCAACUGUA | UACAGUUGCUAGGUGAUGC | 1701 | 2555 | Yes | No | No |
| 1702 | UCACCUAGCAACUGUUGAA | UUCAACAGUUGCUAGGUGA | 1703 | 2558 | Yes | Yes | No |
| 1704 | ACCUAGCAACUGUUGACUA | UAGUCAACAGUUGCUAGGU | 1705 | 2560 | Yes | Yes | No |
| 1706 | CCUAGCAACUGUUGACUGA | UCAGUCAACAGUUGCUAGG | 1707 | 2561 | Yes | Yes | No |
| 1708 | CUAGCAACUGUUGACUGCA | UGCAGUCAACAGUUGCUAG | 1709 | 2562 | Yes | No | No |
| 1710 | UAGCAACUGUUGACUGCAA | UUGCAGUCAACAGUUGCUA | 1711 | 2563 | Yes | No | No |
| 1712 | AGCAACUGUUGACUGCAUA | UAUGCAGUCAACAGUUGCU | 1713 | 2564 | Yes | No | No |
| 1714 | GCAACUGUUGACUGCAUUA | UAAUGCAGUCAACAGUUGC | 1715 | 2565 | Yes | No | No |
| 1716 | AACUGUUGACUGCAUUUUA | UAAAAUGCAGUCAACAGUU | 1717 | 2567 | Yes | No | No |
| 1718 | ACUGUUGACUGCAUUUUCA | UGAAAAUGCAGUCAACAGU | 1719 | 2568 | Yes | No | No |
| 1720 | CUGUUGACUGCAUUUUCUA | UAGAAAAUGCAGUCAACAG | 1721 | 2569 | Yes | No | No |
| 1722 | UGUUGACUGCAUUUUCUCA | UGAGAAAAUGCAGUCAACA | 1723 | 2570 | Yes | No | No |
| 1724 | CCUGGCCAAGGUCGCUAAA | UUUAGCGACCUUGGCCAGG | 1725 | 2588 | Yes | Yes | No |
| 1726 | CCAAGGUCGCUAAGCAAGA | UCUUGCUUAGCGACCUUGG | 1727 | 2593 | Yes | No | No |
| 1728 | CAAGGUCGCUAAGCAAGGA | UCCUUGCUUAGCGACCUUG | 1729 | 2594 | Yes | No | No |
| 1730 | AAGGUCGCUAAGCAAGGAA | UUCCUUGCUUAGCGACCUU | 1731 | 2595 | Yes | No | No |
| 1732 | GCUAAGCAAGGAGAUUACA | UGUAAUCUCCUUGCUUAGC | 1733 | 2601 | No | No | No |
| 1734 | CUAAGCAAGGAGAUUACUA | UAGUAAUCUCCUUGCUUAG | 1735 | 2602 | No | No | No |
| 1736 | UAAGCAAGGAGAUUACUGA | UCAGUAAUCUCCUUGCUUA | 1737 | 2603 | No | No | No |
| 1738 | AAGCAAGGAGAUUACUGCA | UGCAGUAAUCUCCUUGCUU | 1739 | 2604 | No | No | No |
| 1740 | GCAAGGAGAUUACUGCAGA | UCUGCAGUAAUCUCCUUGC | 1741 | 2606 | No | No | No |
| 1742 | CAAGGAGAUUACUGCAGAA | UUCUGCAGUAAUCUCCUUG | 1743 | 2607 | No | No | No |
| 1744 | GAGAUUACUGCAGACCAAA | UUUGGUCUGCAGUAAUCUC | 1745 | 2611 | No | No | No |
| 1746 | AGAUUACUGCAGACCAACA | UGUUGGUCUGCAGUAAUCU | 1747 | 2612 | No | No | No |
| 1748 | GAUUACUGCAGACCAACUA | UAGUUGGUCUGCAGUAAUC | 1749 | 2613 | No | No | No |
| 1750 | AUUACUGCAGACCAACUGA | UCAGUUGGUCUGCAGUAAU | 1751 | 2614 | Yes | No | No |
| 1752 | UACUGCAGACCAACUGUAA | UUACAGUUGGUCUGCAGUA | 1753 | 2616 | Yes | No | No |
| 1754 | CUGCAGACCAACUGUACAA | UUGUACAGUUGGUCUGCAG | 1755 | 2618 | Yes | No | No |
| 1756 | UGCAGACCAACUGUACAAA | UUUGUACAGUUGGUCUGCA | 1757 | 2619 | Yes | No | No |
| 1758 | GCAGACCAACUGUACAAGA | UCUUGUACAGUUGGUCUGC | 1759 | 2620 | Yes | No | No |
| 1760 | CAGACCAACUGUACAAGAA | UUCUUGUACAGUUGGUCUG | 1761 | 2621 | Yes | No | No |
| 1762 | AGACCAACUGUACAAGAAA | UUUCUUGUACAGUUGGUCU | 1763 | 2622 | Yes | No | No |
| 1764 | CAACUGUACAAGAAGAAAA | UUUUCUUCUUGUACAGUUG | 1765 | 2626 | Yes | No | No |
| 1766 | ACUGUACAAGAAGAAAGAA | UUCUUUCUUCUUGUACAGU | 1767 | 2628 | Yes | No | No |
| 1768 | CUGUACAAGAAGAAAGAAA | UUUCUUUCUUCUUGUACAG | 1769 | 2629 | Yes | No | No |
| 1770 | UGUACAAGAAGAAAGAAAA | UUUUCUUUCUUCUUGUACA | 1771 | 2630 | Yes | No | No |
| 1772 | UGGAAGGCACCCUGUGAUA | UAUCACAGGGUGCCUUCCA | 1773 | 2663 | No | No | No |
| 1774 | GGAAGGCACCCUGUGAUUA | UAAUCACAGGGUGCCUUCC | 1775 | 2664 | No | No | No |
| 1776 | AAGGCACCCUGUGAUUGAA | UUCAAUCACAGGGUGCCUU | 1777 | 2666 | No | No | No |
| 1778 | AGGCACCCUGUGAUUGAUA | UAUCAAUCACAGGGUGCCU | 1779 | 2667 | No | No | No |
| 1780 | GGCACCCUGUGAUUGAUGA | UCAUCAAUCACAGGGUGCC | 1781 | 2668 | No | No | No |
| 1782 | GCACCCUGUGAUUGAUGUA | UACAUCAAUCACAGGGUGC | 1783 | 2669 | No | No | No |
| 1784 | CACCCUGUGAUUGAUGUGA | UCACAUCAAUCACAGGGUG | 1785 | 2670 | No | No | No |
| 1786 | CUGUGAUUGAUGUGUUGCA | UGCAACACAUCAAUCACAG | 1787 | 2674 | Yes | No | No |
| 1788 | UGUGAUUGAUGUGUUGCUA | UAGCAACACAUCAAUCACA | 1789 | 2675 | Yes | No | No |
| 1790 | GUGAUUGAUGUGUUGCUGA | UCAGCAACACAUCAAUCAC | 1791 | 2676 | Yes | No | No |
| 1792 | UGUGUUGCUGGGAGAACAA | UUGUUCUCCCAGCAACACA | 1793 | 2684 | Yes | No | No |
| 1794 | CUGGGAGAACAGGAUCAAA | UUUGAUCCUGUUCUCCCAG | 1795 | 2691 | Yes | No | No |
| 1796 | UGGGAGAACAGGAUCAAUA | UAUUGAUCCUGUUCUCCCA | 1797 | 2692 | Yes | No | No |
| 1798 | GGGAGAACAGGAUCAAUAA | UUAUUGAUCCUGUUCUCCC | 1799 | 2693 | Yes | No | No |
| 1800 | GAGAACAGGAUCAAUAUGA | UCAUAUUGAUCCUGUUCUC | 1801 | 2695 | Yes | No | No |
| 1802 | AGAACAGGAUCAAUAUGUA | UACAUAUUGAUCCUGUUCU | 1803 | 2696 | Yes | No | No |
| 1804 | AGGAUCAAUAUGUCCCAAA | UUUGGGACAUAUUGAUCCU | 1805 | 2701 | No | No | No |
| 1806 | GGAUCAAUAUGUCCCAAAA | UUUUGGGACAUAUUGAUCC | 1807 | 2702 | No | No | No |
| 1808 | GAUCAAUAUGUCCCAAAUA | UAUUUGGGACAUAUUGAUC | 1809 | 2703 | No | No | No |
| 1810 | AUCAAUAUGUCCCAAAUAA | UUAUUUGGGACAUAUUGAU | 1811 | 2704 | No | No | No |
| 1812 | CAAUAUGUCCCAAAUAAUA | UAUUAUUUGGGACAUAUUG | 1813 | 2706 | No | No | No |
| 1814 | AUAUGUCCCAAAUAAUACA | UGUAUUAUUUGGGACAUAU | 1815 | 2708 | No | No | No |
| 1816 | GUCCCAAAUAAUACAGAUA | UAUCUGUAUUAUUUGGGAC | 1817 | 2712 | No | No | No |
| 1818 | CCCAAAUAAUACAGAUUUA | UAAAUCUGUAUUAUUUGGG | 1819 | 2714 | No | No | No |
| 1820 | AUAAUACAGAUUUAUCAGA | UCUGAUAAAUCUGUAUUAU | 1821 | 2719 | No | No | No |
| 1822 | UAAUACAGAUUUAUCAGAA | UUCUGAUAAAUCUGUAUUA | 1823 | 2720 | No | No | No |
| 1824 | AAUACAGAUUUAUCAGAGA | UCUCUGAUAAAUCUGUAUU | 1825 | 2721 | No | No | No |
| 1826 | UACAGAUUUAUCAGAGGAA | UUCCUCUGAUAAAUCUGUA | 1827 | 2723 | Yes | No | No |
| 1828 | GAUUUAUCAGAGGACUCAA | UUGAGUCCUCUGAUAAAUC | 1829 | 2727 | Yes | No | No |
| 1830 | UUAUCAGAGGACUCAGAGA | UCUCUGAGUCCUCUGAUAA | 1831 | 2730 | Yes | No | No |
| 1832 | GGACUCAGAGAGAGUAAUA | UAUUACUCUCUCUGAGUCC | 1833 | 2738 | Yes | No | No |
| 1834 | GACUCAGAGAGAGUAAUGA | UCAUUACUCUCUCUGAGUC | 1835 | 2739 | Yes | No | No |
| 1836 | ACUCAGAGAGAGUAAUGAA | UUCAUUACUCUCUCUGAGU | 1837 | 2740 | Yes | No | No |
| 1838 | UCAGAGAGAGUAAUGAUAA | UUAUCAUUACUCUCUCUGA | 1839 | 2742 | Yes | No | No |
| 1840 | CAGAGAGAGUAAUGAUAAA | UUUAUCAUUACUCUCUCUG | 1841 | 2743 | Yes | No | No |
| 1842 | AGAGAGAGUAAUGAUAAUA | UAUUAUCAUUACUCUCUCU | 1843 | 2744 | Yes | No | No |
| 1844 | AGAGUAAUGAUAAUUACCA | UGGUAAUUAUCAUUACUCU | 1845 | 2748 | No | No | No |
| 1846 | AGUAAUGAUAAUUACCGGA | UCCGGUAAUUAUCAUUACU | 1847 | 2750 | No | No | No |
| 1848 | AUAAUUACCGGACCAAACA | UGUUUGGUCCGGUAAUUAU | 1849 | 2757 | No | No | No |
| 1850 | UAAUUACCGGACCAAACAA | UUGUUUGGUCCGGUAAUUA | 1851 | 2758 | No | No | No |
| 1852 | AAUUACCGGACCAAACAUA | UAUGUUUGGUCCGGUAAUU | 1853 | 2759 | No | No | No |
| 1854 | AUUACCGGACCAAACAUGA | UCAUGUUUGGUCCGGUAAU | 1855 | 2760 | No | No | No |
| 1856 | UUACCGGACCAAACAUGGA | UCCAUGUUUGGUCCGGUAA | 1857 | 2761 | No | No | No |
| 1858 | ACCAAACAUGGGUGGAAAA | UUUUCCACCCAUGUUUGGU | 1859 | 2768 | Yes | No | No |
| 1860 | CAAACAUGGGUGGAAAGAA | UUCUUUCCACCCAUGUUUG | 1861 | 2770 | Yes | No | No |
| 1862 | AAACAUGGGUGGAAAGAGA | UCUCUUUCCACCCAUGUUU | 1863 | 2771 | Yes | No | No |
| 1864 | AACAUGGGUGGAAAGAGCA | UGCUCUUUCCACCCAUGUU | 1865 | 2772 | Yes | No | No |
| 1866 | UGGAAAGAGCUCCUACAUA | UAUGUAGGAGCUCUUUCCA | 1867 | 2780 | Yes | No | No |
| 1868 | GAAAGAGCUCCUACAUAAA | UUUAUGUAGGAGCUCUUUC | 1869 | 2782 | Yes | No | No |
| 1870 | GAGCUCCUACAUAAAACAA | UUGUUUUAUGUAGGAGCUC | 1871 | 2786 | Yes | No | Yes |
| 1872 | AGCUCCUACAUAAAACAAA | UUUGUUUUAUGUAGGAGCU | 1873 | 2787 | Yes | No | No |
| 1874 | GCUCCUACAUAAAACAAGA | UCUUGUUUUAUGUAGGAGC | 1875 | 2788 | Yes | No | No |
| 1876 | UCCUACAUAAAACAAGUUA | UAACUUGUUUUAUGUAGGA | 1877 | 2790 | Yes | No | No |
| 1878 | CUACAUAAAACAAGUUGCA | UGCAACUUGUUUUAUGUAG | 1879 | 2792 | Yes | No | No |
| 1880 | UACAUAAAACAAGUUGCAA | UUGCAACUUGUUUUAUGUA | 1881 | 2793 | Yes | No | No |
| 1882 | UAAAACAAGUUGCAUUGAA | UUCAAUGCAACUUGUUUUA | 1883 | 2797 | Yes | No | No |
| 1884 | AAAACAAGUUGCAUUGAUA | UAUCAAUGCAACUUGUUUU | 1885 | 2798 | Yes | No | No |
| 1886 | AAACAAGUUGCAUUGAUUA | UAAUCAAUGCAACUUGUUU | 1887 | 2799 | Yes | No | No |
| 1888 | AACAAGUUGCAUUGAUUAA | UUAAUCAAUGCAACUUGUU | 1889 | 2800 | Yes | No | No |
| 1890 | ACAAGUUGCAUUGAUUACA | UGUAAUCAAUGCAACUUGU | 1891 | 2801 | Yes | No | No |
| 1892 | CAAGUUGCAUUGAUUACCA | UGGUAAUCAAUGCAACUUG | 1893 | 2802 | Yes | No | No |
| 1894 | AGUUGCAUUGAUUACCAUA | UAUGGUAAUCAAUGCAACU | 1895 | 2804 | Yes | No | No |
| 1896 | GUUGCAUUGAUUACCAUCA | UGAUGGUAAUCAAUGCAAC | 1897 | 2805 | Yes | No | No |
| 1898 | UUGCAUUGAUUACCAUCAA | UUGAUGGUAAUCAAUGCAA | 1899 | 2806 | Yes | No | No |
| 1900 | UGCAUUGAUUACCAUCAUA | UAUGAUGGUAAUCAAUGCA | 1901 | 2807 | Yes | No | No |
| 1902 | CAUUGAUUACCAUCAUGGA | UCCAUGAUGGUAAUCAAUG | 1903 | 2809 | Yes | No | No |
| 1904 | AUUGAUUACCAUCAUGGCA | UGCCAUGAUGGUAAUCAAU | 1905 | 2810 | Yes | No | No |
| 1906 | UACCAUCAUGGCUCAGAUA | UAUCUGAGCCAUGAUGGUA | 1907 | 2816 | Yes | Yes | No |
| 1908 | ACCAUCAUGGCUCAGAUUA | UAAUCUGAGCCAUGAUGGU | 1909 | 2817 | Yes | Yes | No |
| 1910 | CCAUCAUGGCUCAGAUUGA | UCAAUCUGAGCCAUGAUGG | 1911 | 2818 | Yes | Yes | No |
| 1912 | CAUCAUGGCUCAGAUUGGA | UCCAAUCUGAGCCAUGAUG | 1913 | 2819 | Yes | Yes | No |
| 1914 | AUCAUGGCUCAGAUUGGCA | UGCCAAUCUGAGCCAUGAU | 1915 | 2820 | Yes | Yes | No |
| 1916 | CAUGGCUCAGAUUGGCUCA | UGAGCCAAUCUGAGCCAUG | 1917 | 2822 | Yes | Yes | No |
| 1918 | CUCAGAUUGGCUCCUAUGA | UCAUAGGAGCCAAUCUGAG | 1919 | 2827 | Yes | No | No |
| 1920 | CAGAUUGGCUCCUAUGUUA | UAACAUAGGAGCCAAUCUG | 1921 | 2829 | Yes | No | No |
| 1922 | AUUGGCUCCUAUGUUCCUA | UAGGAACAUAGGAGCCAAU | 1923 | 2832 | Yes | No | No |
| 1924 | UUGGCUCCUAUGUUCCUGA | UCAGGAACAUAGGAGCCAA | 1925 | 2833 | Yes | No | No |
| 1926 | GGCUCCUAUGUUCCUGCAA | UUGCAGGAACAUAGGAGCC | 1927 | 2835 | Yes | No | No |
| 1928 | UCCUAUGUUCCUGCAGAAA | UUUCUGCAGGAACAUAGGA | 1929 | 2838 | Yes | No | No |
| 1930 | CCUAUGUUCCUGCAGAAGA | UCUUCUGCAGGAACAUAGG | 1931 | 2839 | Yes | No | No |
| 1932 | CUAUGUUCCUGCAGAAGAA | UUCUUCUGCAGGAACAUAG | 1933 | 2840 | Yes | No | No |
| 1934 | CUGCAGAAGAAGCGACAAA | UUUGUCGCUUCUUCUGCAG | 1935 | 2848 | Yes | No | No |
| 1936 | UGCAGAAGAAGCGACAAUA | UAUUGUCGCUUCUUCUGCA | 1937 | 2849 | Yes | No | No |
| 1938 | GCAGAAGAAGCGACAAUUA | UAAUUGUCGCUUCUUCUGC | 1939 | 2850 | Yes | No | No |
| 1940 | AGAAGAAGCGACAAUUGGA | UCCAAUUGUCGCUUCUUCU | 1941 | 2852 | Yes | No | No |
| 1942 | AAGAAGCGACAAUUGGGAA | UUCCCAAUUGUCGCUUCUU | 1943 | 2854 | Yes | No | No |
| 1944 | AGAAGCGACAAUUGGGAUA | UAUCCCAAUUGUCGCUUCU | 1945 | 2855 | Yes | No | No |
| 1946 | GAAGCGACAAUUGGGAUUA | UAAUCCCAAUUGUCGCUUC | 1947 | 2856 | Yes | No | No |
| 1948 | AGCGACAAUUGGGAUUGUA | UACAAUCCCAAUUGUCGCU | 1949 | 2858 | Yes | No | No |
| 1950 | GCGACAAUUGGGAUUGUGA | UCACAAUCCCAAUUGUCGC | 1951 | 2859 | Yes | No | No |
| 1952 | CAAUUGGGAUUGUGGAUGA | UCAUCCACAAUCCCAAUUG | 1953 | 2863 | Yes | Yes | No |
| 1954 | UGGGAUUGUGGAUGGCAUA | UAUGCCAUCCACAAUCCCA | 1955 | 2867 | Yes | Yes | No |
| 1956 | GGGAUUGUGGAUGGCAUUA | UAAUGCCAUCCACAAUCCC | 1957 | 2868 | Yes | Yes | No |
| 1958 | GGAUUGUGGAUGGCAUUUA | UAAAUGCCAUCCACAAUCC | 1959 | 2869 | Yes | Yes | No |
| 1960 | GAUUGUGGAUGGCAUUUUA | UAAAAUGCCAUCCACAAUC | 1961 | 2870 | Yes | Yes | No |
| 1962 | UGUGGAUGGCAUUUUCACA | UGUGAAAAUGCCAUCCACA | 1963 | 2873 | Yes | Yes | No |
| 1964 | GUGGAUGGCAUUUUCACAA | UUGUGAAAAUGCCAUCCAC | 1965 | 2874 | Yes | Yes | No |
| 1966 | GGAUGGCAUUUUCACAAGA | UCUUGUGAAAAUGCCAUCC | 1967 | 2876 | Yes | Yes | No |
| 1968 | GAUGGCAUUUUCACAAGGA | UCCUUGUGAAAAUGCCAUC | 1969 | 2877 | Yes | Yes | No |
| 1970 | UGGCAUUUUCACAAGGAUA | UAUCCUUGUGAAAAUGCCA | 1971 | 2879 | Yes | Yes | No |
| 1972 | GGCAUUUUCACAAGGAUGA | UCAUCCUUGUGAAAAUGCC | 1973 | 2880 | Yes | Yes | No |
| 1974 | GGAUGGGUGCUGCAGACAA | UUGUCUGCAGCACCCAUCC | 1975 | 2893 | Yes | Yes | No |
| 1976 | GAUGGGUGCUGCAGACAAA | UUUGUCUGCAGCACCCAUC | 1977 | 2894 | Yes | Yes | No |
| 1978 | AUGGGUGCUGCAGACAAUA | UAUUGUCUGCAGCACCCAU | 1979 | 2895 | Yes | Yes | No |
| 1980 | UGGGUGCUGCAGACAAUAA | UUAUUGUCUGCAGCACCCA | 1981 | 2896 | Yes | Yes | No |
| 1982 | GGGUGCUGCAGACAAUAUA | UAUAUUGUCUGCAGCACCC | 1983 | 2897 | Yes | Yes | Yes |
| 1984 | GUGCUGCAGACAAUAUAUA | UAUAUAUUGUCUGCAGCAC | 1985 | 2899 | Yes | Yes | Yes |
| 1986 | GCUGCAGACAAUAUAUAUA | UAUAUAUAUUGUCUGCAGC | 1987 | 2901 | Yes | No | No |
| 1988 | CUGCAGACAAUAUAUAUAA | UUAUAUAUAUUGUCUGCAG | 1989 | 2902 | Yes | No | No |
| 1990 | UGCAGACAAUAUAUAUAAA | UUUAUAUAUAUUGUCUGCA | 1991 | 2903 | Yes | No | No |
| 1992 | GACAAUAUAUAUAAAGGAA | UUCCUUUAUAUAUAUUGUC | 1993 | 2907 | Yes | No | No |
| 1994 | ACAAUAUAUAUAAAGGACA | UGUCCUUUAUAUAUAUUGU | 1995 | 2908 | Yes | No | No |
| 1996 | CAAUAUAUAUAAAGGACAA | UUGUCCUUUAUAUAUAUUG | 1997 | 2909 | No | No | No |
| 1998 | AUAUAUAAAGGACAGAGUA | UACUCUGUCCUUUAUAUAU | 1999 | 2913 | No | No | No |
| 2000 | UAUAUAAAGGACAGAGUAA | UUACUCUGUCCUUUAUAUA | 2001 | 2914 | No | No | No |
| 2002 | UAUAAAGGACAGAGUACAA | UUGUACUCUGUCCUUUAUA | 2003 | 2916 | No | No | No |
| 2004 | AUAAAGGACAGAGUACAUA | UAUGUACUCUGUCCUUUAU | 2005 | 2917 | No | No | No |
| 2006 | UAAAGGACAGAGUACAUUA | UAAUGUACUCUGUCCUUUA | 2007 | 2918 | No | No | No |
| 2008 | AAAGGACAGAGUACAUUUA | UAAAUGUACUCUGUCCUUU | 2009 | 2919 | No | No | No |
| 2010 | CAGAGUACAUUUAUGGAAA | UUUCCAUAAAUGUACUCUG | 2011 | 2925 | No | No | No |
| 2012 | AGAGUACAUUUAUGGAAGA | UCUUCCAUAAAUGUACUCU | 2013 | 2926 | No | No | No |
| 2014 | GUACAUUUAUGGAAGAACA | UGUUCUUCCAUAAAUGUAC | 2015 | 2929 | Yes | No | No |
| 2016 | UACAUUUAUGGAAGAACUA | UAGUUCUUCCAUAAAUGUA | 2017 | 2930 | Yes | No | No |
| 2018 | AUUUAUGGAAGAACUGACA | UGUCAGUUCUUCCAUAAAU | 2019 | 2933 | Yes | No | No |
| 2020 | UUUAUGGAAGAACUGACUA | UAGUCAGUUCUUCCAUAAA | 2021 | 2934 | Yes | No | No |
| 2022 | UUAUGGAAGAACUGACUGA | UCAGUCAGUUCUUCCAUAA | 2023 | 2935 | Yes | No | No |
| 2024 | GGAAGAACUGACUGACACA | UGUGUCAGUCAGUUCUUCC | 2025 | 2939 | Yes | No | No |
| 2026 | GAACUGACUGACACAGCAA | UUGCUGUGUCAGUCAGUUC | 2027 | 2943 | Yes | No | No |
| 2028 | UGACACAGCAGAAAUAAUA | UAUUAUUUCUGCUGUGUCA | 2029 | 2951 | Yes | No | No |
| 2030 | GACACAGCAGAAAUAAUCA | UGAUUAUUUCUGCUGUGUC | 2031 | 2952 | Yes | No | No |
| 2032 | CAGAAAAGCAACAUCACAA | UUGUGAUGUUGCUUUUCUG | 2033 | 2969 | Yes | No | No |
| 2034 | AGAAAAGCAACAUCACAGA | UCUGUGAUGUUGCUUUUCU | 2035 | 2970 | Yes | No | No |
| 2036 | GCAACAUCACAGUCCUUGA | UCAAGGACUGUGAUGUUGC | 2037 | 2976 | Yes | No | No |
| 2038 | CAUCACAGUCCUUGGUUAA | UUAACCAAGGACUGUGAUG | 2039 | 2980 | Yes | No | No |
| 2040 | UCACAGUCCUUGGUUAUCA | UGAUAACCAAGGACUGUGA | 2041 | 2982 | Yes | No | No |
| 2042 | CACAGUCCUUGGUUAUCUA | UAGAUAACCAAGGACUGUG | 2043 | 2983 | Yes | No | No |
| 2044 | CAGUCCUUGGUUAUCUUGA | UCAAGAUAACCAAGGACUG | 2045 | 2985 | Yes | No | No |
| 2046 | UCCUUGGUUAUCUUGGAUA | UAUCCAAGAUAACCAAGGA | 2047 | 2988 | Yes | No | No |
| 2048 | CCUUGGUUAUCUUGGAUGA | UCAUCCAAGAUAACCAAGG | 2049 | 2989 | Yes | No | No |
| 2050 | GGUUAUCUUGGAUGAACUA | UAGUUCAUCCAAGAUAACC | 2051 | 2993 | No | No | No |
| 2052 | GUUAUCUUGGAUGAACUAA | UUAGUUCAUCCAAGAUAAC | 2053 | 2994 | No | No | No |
| 2054 | AUCUUGGAUGAACUAGGAA | UUCCUAGUUCAUCCAAGAU | 2055 | 2997 | No | No | No |
| 2056 | UCUUGGAUGAACUAGGAAA | UUUCCUAGUUCAUCCAAGA | 2057 | 2998 | No | No | No |
| 2058 | CUUGGAUGAACUAGGAAGA | UCUUCCUAGUUCAUCCAAG | 2059 | 2999 | No | No | No |
| 2060 | UUGGAUGAACUAGGAAGAA | UUCUUCCUAGUUCAUCCAA | 2061 | 3000 | No | No | No |
| 2062 | AAGAGGGACGAGCACUCAA | UUGAGUGCUCGUCCCUCUU | 2063 | 3014 | No | No | No |
| 2064 | AGAGGGACGAGCACUCAUA | UAUGAGUGCUCGUCCCUCU | 2065 | 3015 | No | No | No |
| 2066 | AGGGACGAGCACUCAUGAA | UUCAUGAGUGCUCGUCCCU | 2067 | 3017 | No | No | No |
| 2068 | GGGACGAGCACUCAUGAUA | UAUCAUGAGUGCUCGUCCC | 2069 | 3018 | No | No | No |
| 2070 | GGACGAGCACUCAUGAUGA | UCAUCAUGAGUGCUCGUCC | 2071 | 3019 | No | No | No |
| 2072 | ACGAGCACUCAUGAUGGAA | UUCCAUCAUGAGUGCUCGU | 2073 | 3021 | No | No | No |
| 2074 | CGAGCACUCAUGAUGGAAA | UUUCCAUCAUGAGUGCUCG | 2075 | 3022 | No | No | No |
| 2076 | GAGCACUCAUGAUGGAAUA | UAUUCCAUCAUGAGUGCUC | 2077 | 3023 | No | No | No |
| 2078 | CACUCAUGAUGGAAUUGCA | UGCAAUUCCAUCAUGAGUG | 2079 | 3026 | No | No | No |
| 2080 | ACUCAUGAUGGAAUUGCCA | UGGCAAUUCCAUCAUGAGU | 2081 | 3027 | No | No | No |
| 2082 | CUCAUGAUGGAAUUGCCAA | UUGGCAAUUCCAUCAUGAG | 2083 | 3028 | No | No | No |
| 2084 | UCAUGAUGGAAUUGCCAUA | UAUGGCAAUUCCAUCAUGA | 2085 | 3029 | No | No | No |
| 2086 | GAAUUGCCAUUGCCUAUGA | UCAUAGGCAAUGGCAAUUC | 2087 | 3037 | Yes | No | No |
| 2088 | AUUGCCAUUGCCUAUGCUA | UAGCAUAGGCAAUGGCAAU | 2089 | 3039 | Yes | No | No |
| 2090 | UUGCCAUUGCCUAUGCUAA | UUAGCAUAGGCAAUGGCAA | 2091 | 3040 | Yes | No | No |
| 2092 | UGCCAUUGCCUAUGCUACA | UGUAGCAUAGGCAAUGGCA | 2093 | 3041 | Yes | No | No |
| 2094 | CAUUGCCUAUGCUACACUA | UAGUGUAGCAUAGGCAAUG | 2095 | 3044 | Yes | No | No |
| 2096 | AUUGCCUAUGCUACACUUA | UAAGUGUAGCAUAGGCAAU | 2097 | 3045 | Yes | No | No |
| 2098 | UUGCCUAUGCUACACUUGA | UCAAGUGUAGCAUAGGCAA | 2099 | 3046 | Yes | No | No |
| 2100 | GCCUAUGCUACACUUGAGA | UCUCAAGUGUAGCAUAGGC | 2101 | 3048 | Yes | No | No |
| 2102 | CCUAUGCUACACUUGAGUA | UACUCAAGUGUAGCAUAGG | 2103 | 3049 | Yes | No | No |
| 2104 | CUAUGCUACACUUGAGUAA | UUACUCAAGUGUAGCAUAG | 2105 | 3050 | Yes | No | No |
| 2106 | UAUGCUACACUUGAGUAUA | UAUACUCAAGUGUAGCAUA | 2107 | 3051 | Yes | No | No |
| 2108 | AUGCUACACUUGAGUAUUA | UAAUACUCAAGUGUAGCAU | 2109 | 3052 | Yes | No | No |
| 2110 | GCUACACUUGAGUAUUUCA | UGAAAUACUCAAGUGUAGC | 2111 | 3054 | Yes | No | No |
| 2112 | CUACACUUGAGUAUUUCAA | UUGAAAUACUCAAGUGUAG | 2113 | 3055 | Yes | No | No |
| 2114 | CUUGAGUAUUUCAUCAGAA | UUCUGAUGAAAUACUCAAG | 2115 | 3060 | Yes | No | No |
| 2116 | UUGAGUAUUUCAUCAGAGA | UCUCUGAUGAAAUACUCAA | 2117 | 3061 | Yes | No | No |
| 2118 | UGAGUAUUUCAUCAGAGAA | UUCUCUGAUGAAAUACUCA | 2119 | 3062 | Yes | No | No |
| 2120 | GAGUAUUUCAUCAGAGAUA | UAUCUCUGAUGAAAUACUC | 2121 | 3063 | Yes | No | No |
| 2122 | UUCAUCAGAGAUGUGAAAA | UUUUCACAUCUCUGAUGAA | 2123 | 3069 | Yes | No | No |
| 2124 | CAUCAGAGAUGUGAAAUCA | UGAUUUCACAUCUCUGAUG | 2125 | 3071 | Yes | No | No |
| 2126 | AGAGAUGUGAAAUCCUUAA | UUAAGGAUUUCACAUCUCU | 2127 | 3075 | Yes | No | No |
| 2128 | GAGAUGUGAAAUCCUUAAA | UUUAAGGAUUUCACAUCUC | 2129 | 3076 | Yes | No | No |
| 2130 | AGAUGUGAAAUCCUUAACA | UGUUAAGGAUUUCACAUCU | 2131 | 3077 | Yes | No | No |
| 2132 | GAUGUGAAAUCCUUAACCA | UGGUUAAGGAUUUCACAUC | 2133 | 3078 | Yes | No | No |
| 2134 | UGUGAAAUCCUUAACCCUA | UAGGGUUAAGGAUUUCACA | 2135 | 3080 | Yes | No | No |
| 2136 | AUCCUUAACCCUGUUUGUA | UACAAACAGGGUUAAGGAU | 2137 | 3086 | Yes | No | No |
| 2138 | CCUUAACCCUGUUUGUCAA | UUGACAAACAGGGUUAAGG | 2139 | 3088 | Yes | No | No |
| 2140 | CUUAACCCUGUUUGUCACA | UGUGACAAACAGGGUUAAG | 2141 | 3089 | Yes | No | No |
| 2142 | ACCCUGUUUGUCACCCAUA | UAUGGGUGACAAACAGGGU | 2143 | 3093 | Yes | No | No |
| 2144 | CCCUGUUUGUCACCCAUUA | UAAUGGGUGACAAACAGGG | 2145 | 3094 | Yes | No | No |
| 2146 | CUGUUUGUCACCCAUUAUA | UAUAAUGGGUGACAAACAG | 2147 | 3096 | Yes | No | No |
| 2148 | GUUUGUCACCCAUUAUCCA | UGGAUAAUGGGUGACAAAC | 2149 | 3098 | Yes | No | No |
| 2150 | UUUGUCACCCAUUAUCCGA | UCGGAUAAUGGGUGACAAA | 2151 | 3099 | Yes | No | No |
| 2152 | CCCAUUAUCCGCCAGUUUA | UAAACUGGCGGAUAAUGGG | 2153 | 3106 | Yes | No | No |
| 2154 | CCAUUAUCCGCCAGUUUGA | UCAAACUGGCGGAUAAUGG | 2155 | 3107 | Yes | No | No |
| 2156 | UUAUCCGCCAGUUUGUGAA | UUCACAAACUGGCGGAUAA | 2157 | 3110 | Yes | No | No |
| 2158 | UAUCCGCCAGUUUGUGAAA | UUUCACAAACUGGCGGAUA | 2159 | 3111 | No | No | No |
| 2160 | AUCCGCCAGUUUGUGAACA | UGUUCACAAACUGGCGGAU | 2161 | 3112 | No | No | No |
| 2162 | CCGCCAGUUUGUGAACUAA | UUAGUUCACAAACUGGCGG | 2163 | 3114 | No | No | No |
| 2164 | CGCCAGUUUGUGAACUAGA | UCUAGUUCACAAACUGGCG | 2165 | 3115 | No | No | No |
| 2166 | GCCAGUUUGUGAACUAGAA | UUCUAGUUCACAAACUGGC | 2167 | 3116 | No | No | No |
| 2168 | CCAGUUUGUGAACUAGAAA | UUUCUAGUUCACAAACUGG | 2169 | 3117 | No | No | No |
| 2170 | CAGUUUGUGAACUAGAAAA | UUUUCUAGUUCACAAACUG | 2171 | 3118 | No | No | No |
| 2172 | UCACACCAGGUGGGGAAUA | UAUUCCCCACCUGGUGUGA | 2173 | 3144 | Yes | No | No |
| 2174 | CACACCAGGUGGGGAAUUA | UAAUUCCCCACCUGGUGUG | 2175 | 3145 | Yes | No | No |
| 2176 | ACACCAGGUGGGGAAUUAA | UUAAUUCCCCACCUGGUGU | 2177 | 3146 | Yes | No | No |
| 2178 | CACCAGGUGGGGAAUUACA | UGUAAUUCCCCACCUGGUG | 2179 | 3147 | Yes | No | No |
| 2180 | ACCAGGUGGGGAAUUACCA | UGGUAAUUCCCCACCUGGU | 2181 | 3148 | Yes | No | No |
| 2182 | CCAGGUGGGGAAUUACCAA | UUGGUAAUUCCCCACCUGG | 2183 | 3149 | Yes | No | No |
| 2184 | AGGUGGGGAAUUACCACAA | UUGUGGUAAUUCCCCACCU | 2185 | 3151 | Yes | No | Yes |
| 2186 | GGUGGGGAAUUACCACAUA | UAUGUGGUAAUUCCCCACC | 2187 | 3152 | Yes | No | Yes |
| 2188 | GUGGGGAAUUACCACAUGA | UCAUGUGGUAAUUCCCCAC | 2189 | 3153 | Yes | Yes | Yes |
| 2190 | GGGAAUUACCACAUGGGAA | UUCCCAUGUGGUAAUUCCC | 2191 | 3156 | Yes | Yes | No |
| 2192 | GGAAUUACCACAUGGGAUA | UAUCCCAUGUGGUAAUUCC | 2193 | 3157 | Yes | Yes | No |
| 2194 | GAAUUACCACAUGGGAUUA | UAAUCCCAUGUGGUAAUUC | 2195 | 3158 | Yes | Yes | No |
| 2196 | AAUUACCACAUGGGAUUCA | UGAAUCCCAUGUGGUAAUU | 2197 | 3159 | Yes | Yes | No |
| 2198 | AUUACCACAUGGGAUUCUA | UAGAAUCCCAUGUGGUAAU | 2199 | 3160 | Yes | Yes | No |
| 2200 | UACCACAUGGGAUUCUUGA | UCAAGAAUCCCAUGUGGUA | 2201 | 3162 | Yes | Yes | No |
| 2202 | CCACAUGGGAUUCUUGGUA | UACCAAGAAUCCCAUGUGG | 2203 | 3164 | Yes | Yes | No |
| 2204 | CAUGGGAUUCUUGGUCAGA | UCUGACCAAGAAUCCCAUG | 2205 | 3167 | Yes | No | No |
| 2206 | GGGAUUCUUGGUCAGUGAA | UUCACUGACCAAGAAUCCC | 2207 | 3170 | No | No | No |
| 2208 | GGAUUCUUGGUCAGUGAGA | UCUCACUGACCAAGAAUCC | 2209 | 3171 | No | No | No |
| 2210 | GUCAGUGAGGAUGAAAGCA | UGCUUUCAUCCUCACUGAC | 2211 | 3180 | No | No | No |
| 2212 | CAGUGAGGAUGAAAGCAAA | UUUGCUUUCAUCCUCACUG | 2213 | 3182 | No | No | No |
| 2214 | GAUGAAAGCAAACUGGAUA | UAUCCAGUUUGCUUUCAUC | 2215 | 3189 | No | No | No |
| 2216 | GAAAGCAAACUGGAUCCAA | UUGGAUCCAGUUUGCUUUC | 2217 | 3192 | No | No | No |
| 2218 | CCAGGCGCAGCAGAACAAA | UUUGUUCUGCUGCGCCUGG | 2219 | 3207 | No | No | No |
| 2220 | CAGGCGCAGCAGAACAAGA | UCUUGUUCUGCUGCGCCUG | 2221 | 3208 | No | No | No |
| 2222 | GGCGCAGCAGAACAAGUCA | UGACUUGUUCUGCUGCGCC | 2223 | 3210 | No | No | No |
| 2224 | GCGCAGCAGAACAAGUCCA | UGGACUUGUUCUGCUGCGC | 2225 | 3211 | No | No | No |
| 2226 | GCAGCAGAACAAGUCCCUA | UAGGGACUUGUUCUGCUGC | 2227 | 3213 | No | No | No |
| 2228 | AGAACAAGUCCCUGAUUUA | UAAAUCAGGGACUUGUUCU | 2229 | 3218 | Yes | No | No |
| 2230 | AACAAGUCCCUGAUUUUGA | UCAAAAUCAGGGACUUGUU | 2231 | 3220 | Yes | No | No |
| 2232 | GUCCCUGAUUUUGUCACCA | UGGUGACAAAAUCAGGGAC | 2233 | 3225 | Yes | No | No |
| 2234 | CCCUGAUUUUGUCACCUUA | UAAGGUGACAAAAUCAGGG | 2235 | 3227 | Yes | No | No |
| 2236 | CCUGAUUUUGUCACCUUCA | UGAAGGUGACAAAAUCAGG | 2237 | 3228 | Yes | No | No |
| 2238 | UGAUUUUGUCACCUUCCUA | UAGGAAGGUGACAAAAUCA | 2239 | 3230 | Yes | No | No |
| 2240 | AUUUUGUCACCUUCCUUUA | UAAAGGAAGGUGACAAAAU | 2241 | 3232 | Yes | No | No |
| 2242 | UUUUGUCACCUUCCUUUAA | UUAAAGGAAGGUGACAAAA | 2243 | 3233 | Yes | No | No |
| 2244 | UGUCACCUUCCUUUACCAA | UUGGUAAAGGAAGGUGACA | 2245 | 3236 | Yes | No | No |
| 2246 | UCACCUUCCUUUACCAAAA | UUUUGGUAAAGGAAGGUGA | 2247 | 3238 | Yes | No | No |
| 2248 | UUCCUUUACCAAAUAACUA | UAGUUAUUUGGUAAAGGAA | 2249 | 3243 | Yes | No | No |
| 2250 | UCCUUUACCAAAUAACUAA | UUAGUUAUUUGGUAAAGGA | 2251 | 3244 | Yes | No | No |
| 2252 | CCUUUACCAAAUAACUAGA | UCUAGUUAUUUGGUAAAGG | 2253 | 3245 | Yes | No | No |
| 2254 | CUUUACCAAAUAACUAGAA | UUCUAGUUAUUUGGUAAAG | 2255 | 3246 | Yes | No | No |
| 2256 | UACCAAAUAACUAGAGGAA | UUCCUCUAGUUAUUUGGUA | 2257 | 3249 | Yes | No | No |
| 2258 | CAAAUAACUAGAGGAAUUA | UAAUUCCUCUAGUUAUUUG | 2259 | 3252 | Yes | No | No |
| 2260 | UAACUAGAGGAAUUGCAGA | UCUGCAAUUCCUCUAGUUA | 2261 | 3256 | Yes | No | No |
| 2262 | CUAGAGGAAUUGCAGCAAA | UUUGCUGCAAUUCCUCUAG | 2263 | 3259 | Yes | No | No |
| 2264 | GGAAUUGCAGCAAGGAGUA | UACUCCUUGCUGCAAUUCC | 2265 | 3264 | Yes | No | No |
| 2266 | GAAUUGCAGCAAGGAGUUA | UAACUCCUUGCUGCAAUUC | 2267 | 3265 | Yes | No | No |
| 2268 | AUUGCAGCAAGGAGUUAUA | UAUAACUCCUUGCUGCAAU | 2269 | 3267 | Yes | No | No |
| 2270 | UUGCAGCAAGGAGUUAUGA | UCAUAACUCCUUGCUGCAA | 2271 | 3268 | Yes | No | No |
| 2272 | GCAAGGAGUUAUGGAUUAA | UUAAUCCAUAACUCCUUGC | 2273 | 3273 | Yes | No | No |
| 2274 | AAGGAGUUAUGGAUUAAAA | UUUUAAUCCAUAACUCCUU | 2275 | 3275 | Yes | No | No |
| 2276 | AGGAGUUAUGGAUUAAAUA | UAUUUAAUCCAUAACUCCU | 2277 | 3276 | Yes | No | No |
| 2278 | GUUAUGGAUUAAAUGUGGA | UCCACAUUUAAUCCAUAAC | 2279 | 3280 | Yes | No | No |
| 2280 | UUAUGGAUUAAAUGUGGCA | UGCCACAUUUAAUCCAUAA | 2281 | 3281 | Yes | No | No |
| 2282 | UAUGGAUUAAAUGUGGCUA | UAGCCACAUUUAAUCCAUA | 2283 | 3282 | Yes | No | No |
| 2284 | AUGGAUUAAAUGUGGCUAA | UUAGCCACAUUUAAUCCAU | 2285 | 3283 | Yes | No | No |
| 2286 | UGGAUUAAAUGUGGCUAAA | UUUAGCCACAUUUAAUCCA | 2287 | 3284 | Yes | No | No |
| 2288 | GAUUAAAUGUGGCUAAACA | UGUUUAGCCACAUUUAAUC | 2289 | 3286 | Yes | No | No |
| 2290 | AUUAAAUGUGGCUAAACUA | UAGUUUAGCCACAUUUAAU | 2291 | 3287 | Yes | No | No |
| 2292 | UUAAAUGUGGCUAAACUAA | UUAGUUUAGCCACAUUUAA | 2293 | 3288 | Yes | No | No |
| 2294 | UAAAUGUGGCUAAACUAGA | UCUAGUUUAGCCACAUUUA | 2295 | 3289 | Yes | No | No |
| 2296 | AAUGUGGCUAAACUAGCAA | UUGCUAGUUUAGCCACAUU | 2297 | 3291 | Yes | No | No |
| 2298 | AUGUGGCUAAACUAGCAGA | UCUGCUAGUUUAGCCACAU | 2299 | 3292 | Yes | No | No |
| 2300 | UGUGGCUAAACUAGCAGAA | UUCUGCUAGUUUAGCCACA | 2301 | 3293 | Yes | No | No |
| 2302 | GUGGCUAAACUAGCAGAUA | UAUCUGCUAGUUUAGCCAC | 2303 | 3294 | Yes | No | No |
| 2304 | UGGCUAAACUAGCAGAUGA | UCAUCUGCUAGUUUAGCCA | 2305 | 3295 | No | No | No |
| 2306 | GCUAAACUAGCAGAUGUUA | UAACAUCUGCUAGUUUAGC | 2307 | 3297 | No | No | No |
| 2308 | CUAAACUAGCAGAUGUUCA | UGAACAUCUGCUAGUUUAG | 2309 | 3298 | No | No | No |
| 2310 | UAAACUAGCAGAUGUUCCA | UGGAACAUCUGCUAGUUUA | 2311 | 3299 | No | No | No |
| 2312 | AAACUAGCAGAUGUUCCUA | UAGGAACAUCUGCUAGUUU | 2313 | 3300 | No | No | No |
| 2314 | CAGAUGUUCCUGGAGAAAA | UUUUCUCCAGGAACAUCUG | 2315 | 3307 | No | No | No |
| 2316 | AUGUUCCUGGAGAAAUUUA | UAAAUUUCUCCAGGAACAU | 2317 | 3310 | No | No | No |
| 2318 | AGAAAGCAGCUCACAAGUA | UACUUGUGAGCUGCUUUCU | 2319 | 3331 | Yes | No | No |
| 2320 | GAAAGCAGCUCACAAGUCA | UGACUUGUGAGCUGCUUUC | 2321 | 3332 | Yes | No | No |
| 2322 | AAAGCAGCUCACAAGUCAA | UUGACUUGUGAGCUGCUUU | 2323 | 3333 | Yes | No | No |
| 2324 | AGCUCACAAGUCAAAAGAA | UUCUUUUGACUUGUGAGCU | 2325 | 3338 | Yes | No | No |
| 2326 | CUCACAAGUCAAAAGAGCA | UGCUCUUUUGACUUGUGAG | 2327 | 3340 | Yes | No | No |
| 2328 | UCACAAGUCAAAAGAGCUA | UAGCUCUUUUGACUUGUGA | 2329 | 3341 | Yes | No | No |
| 2330 | GAGCUGGAAGGAUUAAUAA | UUAUUAAUCCUUCCAGCUC | 2331 | 3354 | Yes | No | No |
| 2332 | GAAGGAUUAAUAAAUACGA | UCGUAUUUAUUAAUCCUUC | 2333 | 3360 | Yes | No | No |
| 2334 | GGAUUAAUAAAUACGAAAA | UUUUCGUAUUUAUUAAUCC | 2335 | 3363 | Yes | No | No |
| 2336 | AUUAAUAAAUACGAAAAGA | UCUUUUCGUAUUUAUUAAU | 2337 | 3365 | Yes | No | No |
| 2338 | AUACGAAAAGAAAGAGACA | UGUCUCUUUCUUUUCGUAU | 2339 | 3373 | No | No | No |
| 2340 | UACGAAAAGAAAGAGACUA | UAGUCUCUUUCUUUUCGUA | 2341 | 3374 | No | No | No |
| 2342 | AAAGAAAGAGACUCAAGUA | UACUUGAGUCUCUUUCUUU | 2343 | 3379 | No | No | No |
| 2344 | AAGAAAGAGACUCAAGUAA | UUACUUGAGUCUCUUUCUU | 2345 | 3380 | No | No | No |
| 2346 | AGAAAGAGACUCAAGUAUA | UAUACUUGAGUCUCUUUCU | 2347 | 3381 | No | No | No |
| 2348 | GAAAGAGACUCAAGUAUUA | UAAUACUUGAGUCUCUUUC | 2349 | 3382 | No | No | No |
| 2350 | AAAGAGACUCAAGUAUUUA | UAAAUACUUGAGUCUCUUU | 2351 | 3383 | No | No | No |
| 2352 | AGAGACUCAAGUAUUUUGA | UCAAAAUACUUGAGUCUCU | 2353 | 3385 | Yes | No | No |
| 2354 | AGACUCAAGUAUUUUGCAA | UUGCAAAAUACUUGAGUCU | 2355 | 3387 | Yes | No | No |
| 2356 | ACUCAAGUAUUUUGCAAAA | UUUUGCAAAAUACUUGAGU | 2357 | 3389 | Yes | No | No |
| 2358 | CUCAAGUAUUUUGCAAAGA | UCUUUGCAAAAUACUUGAG | 2359 | 3390 | Yes | No | No |
| 2360 | AAGUAUUUUGCAAAGUUAA | UUAACUUUGCAAAAUACUU | 2361 | 3393 | Yes | No | No |
| 2362 | GUAUUUUGCAAAGUUAUGA | UCAUAACUUUGCAAAAUAC | 2363 | 3395 | Yes | No | No |
| 2364 | AUUUUGCAAAGUUAUGGAA | UUCCAUAACUUUGCAAAAU | 2365 | 3397 | Yes | No | No |
| 2366 | UUUUGCAAAGUUAUGGACA | UGUCCAUAACUUUGCAAAA | 2367 | 3398 | Yes | No | No |
| 2368 | UUUGCAAAGUUAUGGACGA | UCGUCCAUAACUUUGCAAA | 2369 | 3399 | Yes | No | No |
| 2370 | UUGCAAAGUUAUGGACGAA | UUCGUCCAUAACUUUGCAA | 2371 | 3400 | Yes | No | No |
| 2372 | UGCAAAGUUAUGGACGAUA | UAUCGUCCAUAACUUUGCA | 2373 | 3401 | Yes | No | No |
| 2374 | AAGUUAUGGACGAUGCAUA | UAUGCAUCGUCCAUAACUU | 2375 | 3405 | Yes | No | No |
| 2376 | AGUUAUGGACGAUGCAUAA | UUAUGCAUCGUCCAUAACU | 2377 | 3406 | Yes | No | No |
| 2378 | GUUAUGGACGAUGCAUAAA | UUUAUGCAUCGUCCAUAAC | 2379 | 3407 | Yes | No | No |
| 2380 | UAUGGACGAUGCAUAAUGA | UCAUUAUGCAUCGUCCAUA | 2381 | 3409 | Yes | No | No |
| 2382 | AUGGACGAUGCAUAAUGCA | UGCAUUAUGCAUCGUCCAU | 2383 | 3410 | Yes | No | No |
| 2384 | UGGACGAUGCAUAAUGCAA | UUGCAUUAUGCAUCGUCCA | 2385 | 3411 | Yes | No | No |
| 2386 | GGACGAUGCAUAAUGCACA | UGUGCAUUAUGCAUCGUCC | 2387 | 3412 | Yes | No | No |
| 2388 | GACGAUGCAUAAUGCACAA | UUGUGCAUUAUGCAUCGUC | 2389 | 3413 | Yes | No | No |
| 2390 | CGAUGCAUAAUGCACAAGA | UCUUGUGCAUUAUGCAUCG | 2391 | 3415 | Yes | No | No |
| 2392 | GAUGCAUAAUGCACAAGAA | UUCUUGUGCAUUAUGCAUC | 2393 | 3416 | Yes | No | No |
| 2394 | AUGCAUAAUGCACAAGACA | UGUCUUGUGCAUUAUGCAU | 2395 | 3417 | Yes | No | No |
| 2396 | UGCAUAAUGCACAAGACCA | UGGUCUUGUGCAUUAUGCA | 2397 | 3418 | Yes | No | No |
| 2398 | UGCACAAGACCUGCAGAAA | UUUCUGCAGGUCUUGUGCA | 2399 | 3425 | Yes | No | No |
| 2400 | GCACAAGACCUGCAGAAGA | UCUUCUGCAGGUCUUGUGC | 2401 | 3426 | Yes | No | No |
| 2402 | ACAAGACCUGCAGAAGUGA | UCACUUCUGCAGGUCUUGU | 2403 | 3428 | Yes | No | No |
| 2404 | AGACCUGCAGAAGUGGACA | UGUCCACUUCUGCAGGUCU | 2405 | 3431 | Yes | No | No |
| 2406 | GACCUGCAGAAGUGGACAA | UUGUCCACUUCUGCAGGUC | 2407 | 3432 | Yes | No | No |
| 2408 | AAGUGGACAGAGGAGUUCA | UGAACUCCUCUGUCCACUU | 2409 | 3441 | Yes | No | No |
| 2410 | AGUGGACAGAGGAGUUCAA | UUGAACUCCUCUGUCCACU | 2411 | 3442 | No | No | No |
| 2412 | GGACAGAGGAGUUCAACAA | UUGUUGAACUCCUCUGUCC | 2413 | 3445 | No | No | No |
| 2414 | GACAGAGGAGUUCAACAUA | UAUGUUGAACUCCUCUGUC | 2415 | 3446 | No | No | No |
| 2416 | ACAGAGGAGUUCAACAUGA | UCAUGUUGAACUCCUCUGU | 2417 | 3447 | No | No | No |
| 2418 | AGAGGAGUUCAACAUGGAA | UUCCAUGUUGAACUCCUCU | 2419 | 3449 | No | No | No |
| 2420 | GAGGAGUUCAACAUGGAAA | UUUCCAUGUUGAACUCCUC | 2421 | 3450 | No | No | No |
| 2422 | GGAGUUCAACAUGGAAGAA | UUCUUCCAUGUUGAACUCC | 2423 | 3452 | No | No | No |
| 2424 | AUGGAAGAAACACAGACUA | UAGUCUGUGUUUCUUCCAU | 2425 | 3462 | Yes | No | No |
| 2426 | GAAGAAACACAGACUUCUA | UAGAAGUCUGUGUUUCUUC | 2427 | 3465 | Yes | No | No |
| 2428 | AAGAAACACAGACUUCUCA | UGAGAAGUCUGUGUUUCUU | 2429 | 3466 | Yes | No | No |
| 2430 | AGAAACACAGACUUCUCUA | UAGAGAAGUCUGUGUUUCU | 2431 | 3467 | Yes | No | No |
| 2432 | ACACAGACUUCUCUUCUUA | UAAGAAGAGAAGUCUGUGU | 2433 | 3471 | No | No | No |
| 2434 | UCUCUUCUUCAUUAAAAUA | UAUUUUAAUGAAGAAGAGA | 2435 | 3480 | No | No | No |
| 2436 | UUAAAAUGAAGACUACAUA | UAUGUAGUCUUCAUUUUAA | 2437 | 3491 | No | No | No |
| 2438 | UGAAGACUACAUUUGUGAA | UUCACAAAUGUAGUCUUCA | 2439 | 3497 | No | No | No |
| 2440 | GAAGACUACAUUUGUGAAA | UUUCACAAAUGUAGUCUUC | 2441 | 3498 | No | No | No |
| 2442 | AAGACUACAUUUGUGAACA | UGUUCACAAAUGUAGUCUU | 2443 | 3499 | No | No | No |
| 2444 | AGACUACAUUUGUGAACAA | UUGUUCACAAAUGUAGUCU | 2445 | 3500 | No | No | No |
| 2446 | AAAAUACCAACUGUACAAA | UUUGUACAGUUGGUAUUUU | 2447 | 3533 | Yes | No | No |
| 2448 | CAACUGUACAAAAUAACUA | UAGUUAUUUUGUACAGUUG | 2449 | 3540 | Yes | No | No |
| 2450 | ACUGUACAAAAUAACUCUA | UAGAGUUAUUUUGUACAGU | 2451 | 3542 | Yes | No | No |
| 2452 | UGUACAAAAUAACUCUCCA | UGGAGAGUUAUUUUGUACA | 2453 | 3544 | Yes | No | No |
| 2454 | CAAAAUAACUCUCCAGUAA | UUACUGGAGAGUUAUUUUG | 2455 | 3548 | Yes | No | No |
| 2456 | AAAAUAACUCUCCAGUAAA | UUUACUGGAGAGUUAUUUU | 2457 | 3549 | Yes | No | No |
| 2458 | AAAUAACUCUCCAGUAACA | UGUUACUGGAGAGUUAUUU | 2459 | 3550 | Yes | No | No |
| 2460 | AAUAACUCUCCAGUAACAA | UUGUUACUGGAGAGUUAUU | 2461 | 3551 | Yes | No | No |
| 2462 | AUAACUCUCCAGUAACAGA | UCUGUUACUGGAGAGUUAU | 2463 | 3552 | Yes | No | No |
| 2464 | UAACUCUCCAGUAACAGCA | UGCUGUUACUGGAGAGUUA | 2465 | 3553 | Yes | No | No |
| 2466 | AACUCUCCAGUAACAGCCA | UGGCUGUUACUGGAGAGUU | 2467 | 3554 | Yes | No | No |
| 2468 | CUCUCCAGUAACAGCCUAA | UUAGGCUGUUACUGGAGAG | 2469 | 3556 | Yes | No | No |
| 2470 | CUCCAGUAACAGCCUAUCA | UGAUAGGCUGUUACUGGAG | 2471 | 3558 | No | No | No |
| 2472 | CCAGUAACAGCCUAUCUUA | UAAGAUAGGCUGUUACUGG | 2473 | 3560 | No | No | No |
| 2474 | CAGUAACAGCCUAUCUUUA | UAAAGAUAGGCUGUUACUG | 2475 | 3561 | No | No | No |
| 2476 | AGUAACAGCCUAUCUUUGA | UCAAAGAUAGGCUGUUACU | 2477 | 3562 | No | No | No |
| 2478 | GUAACAGCCUAUCUUUGUA | UACAAAGAUAGGCUGUUAC | 2479 | 3563 | No | No | No |
| 2480 | UAACAGCCUAUCUUUGUGA | UCACAAAGAUAGGCUGUUA | 2481 | 3564 | No | No | No |
| 2482 | ACAGCCUAUCUUUGUGUGA | UCACACAAAGAUAGGCUGU | 2483 | 3566 | No | No | No |
| 2484 | CAGCCUAUCUUUGUGUGAA | UUCACACAAAGAUAGGCUG | 2485 | 3567 | No | No | No |
| 2486 | AGCCUAUCUUUGUGUGACA | UGUCACACAAAGAUAGGCU | 2487 | 3568 | No | No | No |
| 2488 | GCCUAUCUUUGUGUGACAA | UUGUCACACAAAGAUAGGC | 2489 | 3569 | No | No | No |
| 2490 | UAUCUUUGUGUGACAUGUA | UACAUGUCACACAAAGAUA | 2491 | 3572 | No | No | No |
| 2492 | AUCUUUGUGUGACAUGUGA | UCACAUGUCACACAAAGAU | 2493 | 3573 | No | No | No |
| 2494 | UCUUUGUGUGACAUGUGAA | UUCACAUGUCACACAAAGA | 2495 | 3574 | No | No | No |
| 2496 | CUUUGUGUGACAUGUGAGA | UCUCACAUGUCACACAAAG | 2497 | 3575 | No | No | No |
| 2498 | UGUGACAUGUGAGCAUAAA | UUUAUGCUCACAUGUCACA | 2499 | 3580 | Yes | No | No |
| 2500 | GACAUGUGAGCAUAAAAUA | UAUUUUAUGCUCACAUGUC | 2501 | 3583 | Yes | No | No |
| 2502 | ACAUGUGAGCAUAAAAUUA | UAAUUUUAUGCUCACAUGU | 2503 | 3584 | Yes | No | No |
| 2504 | CAUGUGAGCAUAAAAUUAA | UUAAUUUUAUGCUCACAUG | 2505 | 3585 | Yes | No | No |
| 2506 | UGUGAGCAUAAAAUUAUGA | UCAUAAUUUUAUGCUCACA | 2507 | 3587 | Yes | No | No |
| 2508 | GUGAGCAUAAAAUUAUGAA | UUCAUAAUUUUAUGCUCAC | 2509 | 3588 | Yes | No | No |
| 2510 | UGAGCAUAAAAUUAUGACA | UGUCAUAAUUUUAUGCUCA | 2511 | 3589 | Yes | No | No |
| 2512 | UAAAAUUAUGACCAUGGUA | UACCAUGGUCAUAAUUUUA | 2513 | 3595 | Yes | No | No |
| 2514 | AAAAUUAUGACCAUGGUAA | UUACCAUGGUCAUAAUUUU | 2515 | 3596 | Yes | No | No |
| 2516 | AAUUAUGACCAUGGUAUAA | UUAUACCAUGGUCAUAAUU | 2517 | 3598 | Yes | No | No |
| 2518 | AUUAUGACCAUGGUAUAUA | UAUAUACCAUGGUCAUAAU | 2519 | 3599 | Yes | No | No |
| 2520 | UGACCAUGGUAUAUUCCUA | UAGGAAUAUACCAUGGUCA | 2521 | 3603 | Yes | No | No |
| 2522 | GACCAUGGUAUAUUCCUAA | UUAGGAAUAUACCAUGGUC | 2523 | 3604 | Yes | No | No |
| 2524 | ACCAUGGUAUAUUCCUAUA | UAUAGGAAUAUACCAUGGU | 2525 | 3605 | No | No | No |
| 2526 | AUGGUAUAUUCCUAUUGGA | UCCAAUAGGAAUAUACCAU | 2527 | 3608 | No | No | No |
| 2528 | UGGUAUAUUCCUAUUGGAA | UUCCAAUAGGAAUAUACCA | 2529 | 3609 | No | No | No |
| 2530 | GGUAUAUUCCUAUUGGAAA | UUUCCAAUAGGAAUAUACC | 2531 | 3610 | No | No | No |
| 2532 | AUUCCUAUUGGAAACAGAA | UUCUGUUUCCAAUAGGAAU | 2533 | 3615 | No | No | No |
| 2534 | UUCCUAUUGGAAACAGAGA | UCUCUGUUUCCAAUAGGAA | 2535 | 3616 | No | No | No |
| 2536 | UCCUAUUGGAAACAGAGAA | UUCUCUGUUUCCAAUAGGA | 2537 | 3617 | No | No | No |
| 2538 | CCUAUUGGAAACAGAGAGA | UCUCUCUGUUUCCAAUAGG | 2539 | 3618 | No | No | No |
| 2540 | AUUGGAAACAGAGAGGUUA | UAACCUCUCUGUUUCCAAU | 2541 | 3621 | No | No | No |
| 2542 | UUGGAAACAGAGAGGUUUA | UAAACCUCUCUGUUUCCAA | 2543 | 3622 | No | No | No |
| 2544 | UGGAAACAGAGAGGUUUUA | UAAAACCUCUCUGUUUCCA | 2545 | 3623 | Yes | No | No |
| 2546 | GUUUCUGUCUUCCUAACUA | UAGUUAGGAAGACAGAAAC | 2547 | 3662 | No | No | No |
| 2548 | UCUGUCUUCCUAACUUUUA | UAAAAGUUAGGAAGACAGA | 2549 | 3665 | No | No | No |
| 2550 | CUGUCUUCCUAACUUUUCA | UGAAAAGUUAGGAAGACAG | 2551 | 3666 | Yes | No | No |
| 2552 | GUCUUCCUAACUUUUCUAA | UUAGAAAAGUUAGGAAGAC | 2553 | 3668 | Yes | No | No |
| 2554 | UCUUCCUAACUUUUCUACA | UGUAGAAAAGUUAGGAAGA | 2555 | 3669 | No | No | No |
| 2556 | CCUAACUUUUCUACGUAUA | UAUACGUAGAAAAGUUAGG | 2557 | 3673 | No | No | No |
| 2558 | CUAACUUUUCUACGUAUAA | UUAUACGUAGAAAAGUUAG | 2559 | 3674 | No | No | No |
| 2560 | UAACUUUUCUACGUAUAAA | UUUAUACGUAGAAAAGUUA | 2561 | 3675 | No | No | No |
| 2562 | AACUUUUCUACGUAUAAAA | UUUUAUACGUAGAAAAGUU | 2563 | 3676 | No | No | No |
| 2564 | ACUUUUCUACGUAUAAACA | UGUUUAUACGUAGAAAAGU | 2565 | 3677 | No | No | No |
| 2566 | UUUUCUACGUAUAAACACA | UGUGUUUAUACGUAGAAAA | 2567 | 3679 | No | No | No |
| 2568 | UUUCUACGUAUAAACACUA | UAGUGUUUAUACGUAGAAA | 2569 | 3680 | No | No | No |
| 2570 | UCUACGUAUAAACACUCUA | UAGAGUGUUUAUACGUAGA | 2571 | 3682 | No | No | No |
| 2572 | UACGUAUAAACACUCUUGA | UCAAGAGUGUUUAUACGUA | 2573 | 3684 | No | No | No |
| 2574 | ACGUAUAAACACUCUUGAA | UUCAAGAGUGUUUAUACGU | 2575 | 3685 | No | No | No |
| 2576 | CGUAUAAACACUCUUGAAA | UUUCAAGAGUGUUUAUACG | 2577 | 3686 | No | No | No |
| 2578 | AUAAACACUCUUGAAUAGA | UCUAUUCAAGAGUGUUUAU | 2579 | 3689 | Yes | No | No |
| 2580 | UAAACACUCUUGAAUAGAA | UUCUAUUCAAGAGUGUUUA | 2581 | 3690 | Yes | No | No |
| 2582 | ACACUCUUGAAUAGACUUA | UAAGUCUAUUCAAGAGUGU | 2583 | 3693 | Yes | No | No |
| 2584 | ACUCUUGAAUAGACUUCCA | UGGAAGUCUAUUCAAGAGU | 2585 | 3695 | Yes | No | No |
| 2586 | CUCUUGAAUAGACUUCCAA | UUGGAAGUCUAUUCAAGAG | 2587 | 3696 | Yes | No | No |
| 2588 | GAAUAGACUUCCACUUUGA | UCAAAGUGGAAGUCUAUUC | 2589 | 3701 | Yes | No | No |
| 2590 | AAUAGACUUCCACUUUGUA | UACAAAGUGGAAGUCUAUU | 2591 | 3702 | Yes | No | No |
| 2592 | AUAGACUUCCACUUUGUAA | UUACAAAGUGGAAGUCUAU | 2593 | 3703 | Yes | No | No |
| 2594 | UAGACUUCCACUUUGUAAA | UUUACAAAGUGGAAGUCUA | 2595 | 3704 | Yes | No | No |
| 2596 | AGACUUCCACUUUGUAAUA | UAUUACAAAGUGGAAGUCU | 2597 | 3705 | Yes | No | No |
| 2598 | GACUUCCACUUUGUAAUUA | UAAUUACAAAGUGGAAGUC | 2599 | 3706 | Yes | No | No |
| 2600 | ACUUCCACUUUGUAAUUAA | UUAAUUACAAAGUGGAAGU | 2601 | 3707 | Yes | No | No |
| 2602 | CUUCCACUUUGUAAUUAGA | UCUAAUUACAAAGUGGAAG | 2603 | 3708 | Yes | No | No |
| 2604 | UCCACUUUGUAAUUAGAAA | UUUCUAAUUACAAAGUGGA | 2605 | 3710 | Yes | No | No |
| 2606 | ACUUUGUAAUUAGAAAAUA | UAUUUUCUAAUUACAAAGU | 2607 | 3713 | Yes | No | No |
| 2608 | AGAAAAUUUUAUGGACAGA | UCUGUCCAUAAAAUUUUCU | 2609 | 3724 | No | No | No |
| 2610 | GAAAAUUUUAUGGACAGUA | UACUGUCCAUAAAAUUUUC | 2611 | 3725 | No | No | No |
| 2612 | AAUUUUAUGGACAGUAAGA | UCUUACUGUCCAUAAAAUU | 2613 | 3728 | No | No | No |
| 2614 | AUUUUAUGGACAGUAAGUA | UACUUACUGUCCAUAAAAU | 2615 | 3729 | No | No | No |
| 2616 | UUUAUGGACAGUAAGUCCA | UGGACUUACUGUCCAUAAA | 2617 | 3731 | No | No | No |
| 2618 | UUAUGGACAGUAAGUCCAA | UUGGACUUACUGUCCAUAA | 2619 | 3732 | No | No | No |
| 2620 | UGGACAGUAAGUCCAGUAA | UUACUGGACUUACUGUCCA | 2621 | 3735 | Yes | No | No |
| 2622 | GACAGUAAGUCCAGUAAAA | UUUUACUGGACUUACUGUC | 2623 | 3737 | Yes | No | No |
| 2624 | ACAGUAAGUCCAGUAAAGA | UCUUUACUGGACUUACUGU | 2625 | 3738 | Yes | No | No |
| 2626 | CAGUAAGUCCAGUAAAGCA | UGCUUUACUGGACUUACUG | 2627 | 3739 | Yes | No | No |
| 2628 | AGUAAGUCCAGUAAAGCCA | UGGCUUUACUGGACUUACU | 2629 | 3740 | Yes | No | No |
| 2630 | GUAAGUCCAGUAAAGCCUA | UAGGCUUUACUGGACUUAC | 2631 | 3741 | Yes | No | No |
| 2632 | UAAGUCCAGUAAAGCCUUA | UAAGGCUUUACUGGACUUA | 2633 | 3742 | Yes | No | No |
| 2634 | AAGUCCAGUAAAGCCUUAA | UUAAGGCUUUACUGGACUU | 2635 | 3743 | Yes | No | No |
| 2636 | AGUCCAGUAAAGCCUUAAA | UUUAAGGCUUUACUGGACU | 2637 | 3744 | Yes | No | No |
| 2638 | GUCCAGUAAAGCCUUAAGA | UCUUAAGGCUUUACUGGAC | 2639 | 3745 | Yes | No | No |
| 2640 | UCCAGUAAAGCCUUAAGUA | UACUUAAGGCUUUACUGGA | 2641 | 3746 | Yes | No | No |
| 2642 | CCAGUAAAGCCUUAAGUGA | UCACUUAAGGCUUUACUGG | 2643 | 3747 | Yes | No | No |
| 2644 | CAGUAAAGCCUUAAGUGGA | UCCACUUAAGGCUUUACUG | 2645 | 3748 | Yes | No | No |
| 2646 | GUAAAGCCUUAAGUGGCAA | UUGCCACUUAAGGCUUUAC | 2647 | 3750 | Yes | No | No |
| 2648 | AAGCCUUAAGUGGCAGAAA | UUUCUGCCACUUAAGGCUU | 2649 | 3753 | Yes | No | No |
| 2650 | AGCCUUAAGUGGCAGAAUA | UAUUCUGCCACUUAAGGCU | 2651 | 3754 | Yes | No | No |
| 2652 | CCUUAAGUGGCAGAAUAUA | UAUAUUCUGCCACUUAAGG | 2653 | 3756 | Yes | No | No |
| 2654 | CUUAAGUGGCAGAAUAUAA | UUAUAUUCUGCCACUUAAG | 2655 | 3757 | Yes | No | No |
| 2656 | UUAAGUGGCAGAAUAUAAA | UUUAUAUUCUGCCACUUAA | 2657 | 3758 | Yes | No | No |
| 2658 | UAAGUGGCAGAAUAUAAUA | UAUUAUAUUCUGCCACUUA | 2659 | 3759 | Yes | No | No |
| 2660 | GUGGCAGAAUAUAAUUCCA | UGGAAUUAUAUUCUGCCAC | 2661 | 3762 | Yes | No | No |
| 2662 | UGGCAGAAUAUAAUUCCCA | UGGGAAUUAUAUUCUGCCA | 2663 | 3763 | Yes | No | No |
| 2664 | GCAGAAUAUAAUUCCCAAA | UUUGGGAAUUAUAUUCUGC | 2665 | 3765 | Yes | No | No |
| 2666 | AAUAUAAUUCCCAAGCUUA | UAAGCUUGGGAAUUAUAUU | 2667 | 3769 | Yes | No | No |
| 2668 | UAUAAUUCCCAAGCUUUUA | UAAAAGCUUGGGAAUUAUA | 2669 | 3771 | Yes | No | No |
| 2670 | AUAAUUCCCAAGCUUUUGA | UCAAAAGCUUGGGAAUUAU | 2671 | 3772 | Yes | No | No |
| 2672 | UAAUUCCCAAGCUUUUGGA | UCCAAAAGCUUGGGAAUUA | 2673 | 3773 | Yes | No | No |
| 2674 | AAUUCCCAAGCUUUUGGAA | UUCCAAAAGCUUGGGAAUU | 2675 | 3774 | Yes | No | No |
| 2676 | AUUCCCAAGCUUUUGGAGA | UCUCCAAAAGCUUGGGAAU | 2677 | 3775 | Yes | No | No |
| 2678 | AAGCUUUUGGAGGGUGAUA | UAUCACCCUCCAAAAGCUU | 2679 | 3781 | Yes | No | No |
| 2680 | AGCUUUUGGAGGGUGAUAA | UUAUCACCCUCCAAAAGCU | 2681 | 3782 | Yes | No | No |
| 2682 | GCUUUUGGAGGGUGAUAUA | UAUAUCACCCUCCAAAAGC | 2683 | 3783 | Yes | No | No |
| 2684 | CUUUUGGAGGGUGAUAUAA | UUAUAUCACCCUCCAAAAG | 2685 | 3784 | Yes | No | No |
| 2686 | UUUUGGAGGGUGAUAUAAA | UUUAUAUCACCCUCCAAAA | 2687 | 3785 | Yes | No | No |
| 2688 | UUUGUUUCAGUUCAGAUAA | UUAUCUGAACUGAAACAAA | 2689 | 3823 | Yes | No | No |
| 2690 | UCAGUUCAGAUAAUUGGCA | UGCCAAUUAUCUGAACUGA | 2691 | 3829 | Yes | No | No |
| 2692 | UUGGCAACUGGGUGAAUCA | UGAUUCACCCAGUUGCCAA | 2693 | 3842 | No | No | No |
| 2694 | GGCAACUGGGUGAAUCUGA | UCAGAUUCACCCAGUUGCC | 2695 | 3844 | No | No | No |
| 2696 | GCAACUGGGUGAAUCUGGA | UCCAGAUUCACCCAGUUGC | 2697 | 3845 | No | No | No |
| 2698 | CAACUGGGUGAAUCUGGCA | UGCCAGAUUCACCCAGUUG | 2699 | 3846 | No | No | No |
| 2700 | GUGAAUCUGGCAGGAAUCA | UGAUUCCUGCCAGAUUCAC | 2701 | 3853 | Yes | No | No |
| 2702 | UGAAUCUGGCAGGAAUCUA | UAGAUUCCUGCCAGAUUCA | 2703 | 3854 | Yes | No | No |
| 2704 | GAAUCUGGCAGGAAUCUAA | UUAGAUUCCUGCCAGAUUC | 2705 | 3855 | No | No | No |
| 2706 | AAUCUGGCAGGAAUCUAUA | UAUAGAUUCCUGCCAGAUU | 2707 | 3856 | No | No | No |
| 2708 | AUCUGGCAGGAAUCUAUCA | UGAUAGAUUCCUGCCAGAU | 2709 | 3857 | No | No | No |
| 2710 | CUGGCAGGAAUCUAUCCAA | UUGGAUAGAUUCCUGCCAG | 2711 | 3859 | No | No | No |
| 2712 | UGGCAGGAAUCUAUCCAUA | UAUGGAUAGAUUCCUGCCA | 2713 | 3860 | No | No | No |
| 2714 | GGCAGGAAUCUAUCCAUUA | UAAUGGAUAGAUUCCUGCC | 2715 | 3861 | No | No | No |
| 2716 | GCAGGAAUCUAUCCAUUGA | UCAAUGGAUAGAUUCCUGC | 2717 | 3862 | No | No | No |
| 2718 | CAGGAAUCUAUCCAUUGAA | UUCAAUGGAUAGAUUCCUG | 2719 | 3863 | No | No | No |
| 2720 | AGGAAUCUAUCCAUUGAAA | UUUCAAUGGAUAGAUUCCU | 2721 | 3864 | No | No | No |
| 2722 | GGAAUCUAUCCAUUGAACA | UGUUCAAUGGAUAGAUUCC | 2723 | 3865 | No | No | No |
| 2724 | GAAUCUAUCCAUUGAACUA | UAGUUCAAUGGAUAGAUUC | 2725 | 3866 | No | No | No |
| 2726 | AAUCUAUCCAUUGAACUAA | UUAGUUCAAUGGAUAGAUU | 2727 | 3867 | No | No | No |
| 2728 | AUCUAUCCAUUGAACUAAA | UUUAGUUCAAUGGAUAGAU | 2729 | 3868 | No | No | No |
| 2730 | UCUAUCCAUUGAACUAAAA | UUUUAGUUCAAUGGAUAGA | 2731 | 3869 | No | No | No |
| 2732 | UAUCCAUUGAACUAAAAUA | UAUUUUAGUUCAAUGGAUA | 2733 | 3871 | No | No | No |
| 2734 | CCAUUGAACUAAAAUAAUA | UAUUAUUUUAGUUCAAUGG | 2735 | 3874 | No | No | No |
| 2736 | UGAACUAAAAUAAUUUUAA | UUAAAAUUAUUUUAGUUCA | 2737 | 3878 | Yes | No | No |
| 2738 | ACUAAAAUAAUUUUAUUAA | UUAAUAAAAUUAUUUUAGU | 2739 | 3881 | Yes | No | No |
| 2740 | UUUAUUAUGCAACCAGUUA | UAACUGGUUGCAUAAUAAA | 2741 | 3892 | No | No | No |
| 2742 | UUAUUAUGCAACCAGUUUA | UAAACUGGUUGCAUAAUAA | 2743 | 3893 | No | No | No |
| 2744 | UAUUAUGCAACCAGUUUAA | UUAAACUGGUUGCAUAAUA | 2745 | 3894 | No | No | No |
| 2746 | AUUAUGCAACCAGUUUAUA | UAUAAACUGGUUGCAUAAU | 2747 | 3895 | No | No | No |
| 2748 | UAUGCAACCAGUUUAUCCA | UGGAUAAACUGGUUGCAUA | 2749 | 3897 | No | No | No |
| 2750 | AUGCAACCAGUUUAUCCAA | UUGGAUAAACUGGUUGCAU | 2751 | 3898 | No | No | No |
| 2752 | CCAGUUUAUCCACCAAGAA | UUCUUGGUGGAUAAACUGG | 2753 | 3904 | Yes | No | No |
| 2754 | AGUUUAUCCACCAAGAACA | UGUUCUUGGUGGAUAAACU | 2755 | 3906 | Yes | No | No |
| 2756 | UUAUCCACCAAGAACAUAA | UUAUGUUCUUGGUGGAUAA | 2757 | 3909 | Yes | No | No |
| 2758 | UAUCCACCAAGAACAUAAA | UUUAUGUUCUUGGUGGAUA | 2759 | 3910 | Yes | No | No |
| 2760 | AUCCACCAAGAACAUAAGA | UCUUAUGUUCUUGGUGGAU | 2761 | 3911 | Yes | No | No |
| 2762 | UCCACCAAGAACAUAAGAA | UUCUUAUGUUCUUGGUGGA | 2763 | 3912 | Yes | No | No |
| 2764 | CCACCAAGAACAUAAGAAA | UUUCUUAUGUUCUUGGUGG | 2765 | 3913 | Yes | No | No |
| 2766 | CACCAAGAACAUAAGAAUA | UAUUCUUAUGUUCUUGGUG | 2767 | 3914 | Yes | No | No |
| 2768 | ACCAAGAACAUAAGAAUUA | UAAUUCUUAUGUUCUUGGU | 2769 | 3915 | Yes | No | No |
| 2770 | UAAGUAGAAAGAAUUGGCA | UGCCAAUUCUUUCUACUUA | 2771 | 3938 | No | No | No |
| 2772 | AGUAGAAAGAAUUGGCCAA | UUGGCCAAUUCUUUCUACU | 2773 | 3940 | No | No | No |
| 2774 | AUAAAGUACAUCUCUACUA | UAGUAGAGAUGUACUUUAU | 2775 | 4079 | Yes | No | No |
| 2776 | AAUGAGCCGAGAUCACGUA | UACGUGAUCUCGGCUCAUU | 2777 | 4202 | No | No | No |
| 2778 | GAAAUAGAAUUAUCAAGCA | UGCUUGAUAAUUCUAUUUC | 2779 | 4286 | Yes | No | No |
| 2780 | AAUAGAAUUAUCAAGCUUA | UAAGCUUGAUAAUUCUAUU | 2781 | 4288 | Yes | No | No |
| 2782 | UAGAAUUAUCAAGCUUUUA | UAAAAGCUUGAUAAUUCUA | 2783 | 4290 | Yes | No | No |
| 2784 | AGAAUUAUCAAGCUUUUAA | UUAAAAGCUUGAUAAUUCU | 2785 | 4291 | Yes | No | No |
| 2786 | GAAUUAUCAAGCUUUUAAA | UUUAAAAGCUUGAUAAUUC | 2787 | 4292 | Yes | No | No |
| 2788 | AAUUAUCAAGCUUUUAAAA | UUUUAAAAGCUUGAUAAUU | 2789 | 4293 | Yes | No | No |
| 2790 | UAGAGCACAGAAGGAAUAA | UUAUUCCUUCUGUGCUCUA | 2791 | 4314 | No | No | No |
| 2792 | GCACAGAAGGAAUAAGGUA | UACCUUAUUCCUUCUGUGC | 2793 | 4318 | No | No | No |
| 2794 | CACAGAAGGAAUAAGGUCA | UGACCUUAUUCCUUCUGUG | 2795 | 4319 | No | No | No |
| 2796 | ACAGAAGGAAUAAGGUCAA | UUGACCUUAUUCCUUCUGU | 2797 | 4320 | No | No | No |
| 2798 | CAGAAGGAAUAAGGUCAUA | UAUGACCUUAUUCCUUCUG | 2799 | 4321 | No | No | No |
| 2800 | AGAAGGAAUAAGGUCAUGA | UCAUGACCUUAUUCCUUCU | 2801 | 4322 | No | No | No |
| 2802 | GAAGGAAUAAGGUCAUGAA | UUCAUGACCUUAUUCCUUC | 2803 | 4323 | No | No | No |
| 2804 | AAGGAAUAAGGUCAUGAAA | UUUCAUGACCUUAUUCCUU | 2805 | 4324 | No | No | No |
| 2806 | AGGAAUAAGGUCAUGAAAA | UUUUCAUGACCUUAUUCCU | 2807 | 4325 | No | No | No |
| 2808 | GGAAUAAGGUCAUGAAAUA | UAUUUCAUGACCUUAUUCC | 2809 | 4326 | No | No | No |
| 2810 | AAUAAGGUCAUGAAAUUUA | UAAAUUUCAUGACCUUAUU | 2811 | 4328 | Yes | No | No |
| 2812 | AUAAGGUCAUGAAAUUUAA | UUAAAUUUCAUGACCUUAU | 2813 | 4329 | Yes | No | No |
| 2814 | GAAAUUUAAAAGGUUAAAA | UUUUAACCUUUUAAAUUUC | 2815 | 4339 | No | No | No |
| 2816 | GGUUAAAUAUUGUCAUAGA | UCUAUGACAAUAUUUAACC | 2817 | 4350 | No | No | No |
| 2818 | UUAAAUAUUGUCAUAGGAA | UUCCUAUGACAAUAUUUAA | 2819 | 4352 | No | No | No |
| 2820 | AAUAUUGUCAUAGGAUUAA | UUAAUCCUAUGACAAUAUU | 2821 | 4355 | No | No | No |
| 2822 | UAUUGUCAUAGGAUUAAGA | UCUUAAUCCUAUGACAAUA | 2823 | 4357 | No | No | No |
| 2824 | UUGUCAUAGGAUUAAGCAA | UUGCUUAAUCCUAUGACAA | 2825 | 4359 | No | No | No |
| 2826 | GUCAUAGGAUUAAGCAGUA | UACUGCUUAAUCCUAUGAC | 2827 | 4361 | No | No | No |
| 2828 | UAGGAUUAAGCAGUUUAAA | UUUAAACUGCUUAAUCCUA | 2829 | 4365 | No | No | No |
| 2830 | UUAAGCAGUUUAAAGAUUA | UAAUCUUUAAACUGCUUAA | 2831 | 4370 | No | No | No |
| 2832 | AGCAGUUUAAAGAUUGUUA | UAACAAUCUUUAAACUGCU | 2833 | 4373 | No | No | No |
| 2834 | GCAGUUUAAAGAUUGUUGA | UCAACAAUCUUUAAACUGC | 2835 | 4374 | No | No | No |
| 2836 | CAGUUUAAAGAUUGUUGGA | UCCAACAAUCUUUAAACUG | 2837 | 4375 | No | No | No |
| 2838 | GUUUAAAGAUUGUUGGAUA | UAUCCAACAAUCUUUAAAC | 2839 | 4377 | No | No | No |
| 2840 | UUAAAGAUUGUUGGAUGAA | UUCAUCCAACAAUCUUUAA | 2841 | 4379 | No | No | No |
| 2842 | GAUUGUUGGAUGAAAUUAA | UUAAUUUCAUCCAACAAUC | 2843 | 4384 | No | No | No |
| 2844 | UUGGAUGAAAUUAUUUGUA | UACAAAUAAUUUCAUCCAA | 2845 | 4389 | Yes | No | No |
| 2846 | GAUGAAAUUAUUUGUCAUA | UAUGACAAAUAAUUUCAUC | 2847 | 4392 | Yes | No | No |
| 2848 | UAUUUGUCAUUCAUUCAAA | UUUGAAUGAAUGACAAAUA | 2849 | 4400 | No | No | No |
| 2850 | UGUCAUUCAUUCAAGUAAA | UUUACUUGAAUGAAUGACA | 2851 | 4404 | No | No | No |
| 2852 | GUCAUUCAUUCAAGUAAUA | UAUUACUUGAAUGAAUGAC | 2853 | 4405 | No | No | No |
| 2854 | AUUCAUUCAAGUAAUAAAA | UUUUAUUACUUGAAUGAAU | 2855 | 4408 | No | No | No |
| 2856 | UUCAUUCAAGUAAUAAAUA | UAUUUAUUACUUGAAUGAA | 2857 | 4409 | No | No | No |
| 2858 | UCAAGUAAUAAAUAUUUAA | UUAAAUAUUUAUUACUUGA | 2859 | 4414 | No | No | No |
| 2860 | CAAGUAAUAAAUAUUUAAA | UUUAAAUAUUUAUUACUUG | 2861 | 4415 | No | No | No |
| 2862 | AGUAAUAAAUAUUUAAUGA | UCAUUAAAUAUUUAUUACU | 2863 | 4417 | Yes | No | No |
| 2864 | GUAAUAAAUAUUUAAUGAA | UUCAUUAAAUAUUUAUUAC | 2865 | 4418 | Yes | No | No |
| 2866 | AAAUAUUUAAUGAAUACUA | UAGUAUUCAUUAAAUAUUU | 2867 | 4423 | Yes | No | No |
| 2868 | UAAUGAAUACUUGCUAUAA | UUAUAGCAAGUAUUCAUUA | 2869 | 4430 | Yes | No | No |
| 2870 | AAUGAAUACUUGCUAUAAA | UUUAUAGCAAGUAUUCAUU | 2871 | 4431 | No | No | No |
| 2872 | AUGAAUACUUGCUAUAAAA | UUUUAUAGCAAGUAUUCAU | 2873 | 4432 | No | No | No |

TABLE 4
Sense strands with cross-species compatibility with Human and Cyno MSH3
SENSE STRAND SEQ ID NOS/SENSE OLIGO NOS
30, 32, 34, 56, 58, 60, 62, 64, 66, 68, 70, 72, 74, 76, 78, 80, 82, 84, 86, 102, 104, 106, 108,
110, 112, 114, 116, 118, 120, 122, 124, 126, 128, 130, 132, 134, 136, 138, 140, 142, 144, 146,
148, 150, 152, 154, 156, 158, 160, 162, 164, 190, 192, 234, 236, 238, 240, 242, 244, 246, 248,
250, 252, 254, 256, 258, 260, 302, 304, 306, 308, 310, 312, 314, 316, 318, 320, 322, 324, 326,
328, 330, 332, 334, 336, 338, 340, 342, 344, 346, 348, 350, 352, 354, 356, 358, 360, 362, 364,
366, 368, 370, 372, 374, 376, 378, 380, 382, 384, 386, 388, 390, 392, 394, 396, 398, 400, 402,
404, 406, 408, 410, 412, 414, 416, 418, 420, 422, 424, 426, 428, 430, 432, 434, 436, 438, 440,
442, 444, 446, 448, 450, 452, 454, 456, 458, 460, 462, 464, 466, 468, 470, 472, 474, 476, 478,
480, 482, 484, 486, 488, 490, 492, 494, 496, 498, 500, 502, 504, 506, 508, 510, 512, 514, 516,
518, 520, 522, 524, 526, 528, 530, 532, 534, 536, 538, 540, 542, 544, 546, 548, 550, 552, 554,
556, 558, 560, 562, 564, 566, 568, 570, 572, 574, 576, 578, 580, 582, 584, 608, 610, 612, 614,
616, 618, 620, 622, 624, 626, 628, 630, 632, 634, 636, 638, 640, 642, 644, 646, 648, 650, 652,
654, 656, 658, 660, 662, 664, 666, 668, 670, 672, 674, 676, 678, 680, 682, 684, 686, 688, 690,
692, 694, 696, 698, 700, 702, 704, 706, 708, 710, 712, 714, 716, 718, 720, 722, 724, 726, 728,
730, 732, 734, 736, 738, 740, 742, 744, 746, 748, 754, 756, 758, 760, 762, 776, 778, 780, 782,
784, 786, 788, 790, 792, 794, 796, 798, 820, 822, 824, 826, 828, 830, 832, 834, 836, 838, 840,
842, 844, 846, 848, 850, 852, 854, 874, 876, 878, 880, 882, 884, 886, 888, 890, 892, 894, 896,
898, 900, 902, 904, 906, 908, 910, 912, 914, 916, 918, 920, 922, 924, 926, 928, 930, 932, 934,
936, 938, 940, 942, 944, 946, 948, 960, 962, 964, 966, 968, 970, 972, 974, 976, 978, 980, 982,
984, 986, 988, 990, 992, 994, 996, 998, 1000, 1002, 1004, 1006, 1008, 1010, 1012, 1014,
1016, 1018, 1020, 1022, 1024, 1026, 1028, 1030, 1032, 1034, 1036, 1038, 1040, 1042, 1044,
1046, 1048, 1050, 1052, 1054, 1056, 1058, 1060, 1062, 1064, 1066, 1068, 1070, 1072, 1074,
1076, 1078, 1080, 1082, 1084, 1086, 1088, 1090, 1092, 1094, 1096, 1098, 1100, 1102, 1104,
1106, 1108, 1110, 1112, 1114, 1116, 1118, 1120, 1122, 1124, 1126, 1128, 1130, 1132, 1134,
1136, 1138, 1140, 1142, 1144, 1146, 1148, 1150, 1152, 1182, 1184, 1186, 1188, 1190, 1192,
1194, 1196, 1198, 1200, 1202, 1204, 1206, 1208, 1210, 1212, 1214, 1216, 1218, 1220, 1222,
1224, 1226, 1228, 1230, 1232, 1250, 1252, 1254, 1256, 1258, 1260, 1262, 1264, 1266, 1268,
1270, 1272, 1294, 1296, 1298, 1300, 1302, 1304, 1306, 1308, 1310, 1312, 1314, 1316, 1318,
1362, 1364, 1366, 1368, 1370, 1372, 1374, 1376, 1378, 1380, 1382, 1384, 1386, 1388, 1390,
1392, 1394, 1396, 1398, 1400, 1402, 1404, 1406, 1408, 1410, 1412, 1414, 1416, 1418, 1420,
1422, 1424, 1426, 1428, 1430, 1432, 1434, 1436, 1438, 1440, 1442, 1444, 1446, 1448, 1450,
1452, 1454, 1456, 1492, 1494, 1496, 1498, 1500, 1502, 1504, 1506, 1508, 1510, 1512, 1514,
1516, 1518, 1520, 1522, 1524, 1526, 1532, 1534, 1536, 1538, 1540, 1542, 1544, 1546, 1548,
1550, 1552, 1554, 1556, 1558, 1560, 1562, 1564, 1566, 1568, 1570, 1572, 1574, 1576, 1578,
1580, 1582, 1584, 1586, 1588, 1590, 1592, 1620, 1622, 1624, 1626, 1630, 1632, 1634, 1636,
1638, 1640, 1642, 1644, 1646, 1648, 1650, 1652, 1654, 1656, 1658, 1660, 1662, 1664, 1666,
1668, 1670, 1672, 1674, 1676, 1678, 1692, 1694, 1696, 1698, 1700, 1702, 1704, 1706, 1708,
1710, 1712, 1714, 1716, 1718, 1720, 1722, 1724, 1726, 1728, 1730, 1750, 1752, 1754, 1756,
1758, 1760, 1762, 1764, 1766, 1768, 1770, 1786, 1788, 1790, 1792, 1794, 1796, 1798, 1800,
1802, 1826, 1828, 1830, 1832, 1834, 1836, 1838, 1840, 1842, 1858, 1860, 1862, 1864, 1866,
1868, 1870, 1872, 1874, 1876, 1878, 1880, 1882, 1884, 1886, 1888, 1890, 1892, 1894, 1896,
1898, 1900, 1902, 1904, 1906, 1908, 1910, 1912, 1914, 1916, 1918, 1920, 1922, 1924, 1926,
1928, 1930, 1932, 1934, 1936, 1938, 1940, 1942, 1944, 1946, 1948, 1950, 1952, 1954, 1956,
1958, 1960, 1962, 1964, 1966, 1968, 1970, 1972, 1974, 1976, 1978, 1980, 1982, 1984, 1986,
1988, 1990, 1992, 1994, 2014, 2016, 2018, 2020, 2022, 2024, 2026, 2028, 2030, 2032, 2034,
2036, 2038, 2040, 2042, 2044, 2046, 2048, 2086, 2088, 2090, 2092, 2094, 2096, 2098, 2100,
2102, 2104, 2106, 2108, 2110, 2112, 2114, 2116, 2118, 2120, 2122, 2124, 2126, 2128, 2130,
2132, 2134, 2136, 2138, 2140, 2142, 2144, 2146, 2148, 2150, 2152, 2154, 2156, 2172, 2174,
2176, 2178, 2180, 2182, 2184, 2186, 2188, 2190, 2192, 2194, 2196, 2198, 2200, 2202, 2204,
2214, 2216, 2228, 2230, 2232, 2234, 2236, 2238, 2240, 2242, 2244, 2246, 2248, 2250, 2252,
2254, 2256, 2258, 2260, 2262, 2264, 2266, 2268, 2270, 2272, 2274, 2276, 2278, 2280, 2282,
2284, 2286, 2288, 2290, 2292, 2294, 2296, 2298, 2300, 2302, 2318, 2320, 2322, 2324, 2326,
2328, 2330, 2332, 2334, 2336, 2352, 2354, 2356, 2358, 2360, 2362, 2364, 2366, 2368, 2370,
2372, 2374, 2376, 2378, 2380, 2382, 2384, 2386, 2388, 2390, 2392, 2394, 2396, 2398, 2400,
2402, 2404, 2406, 2408, 2424, 2426, 2428, 2430, 2446, 2448, 2450, 2452, 2454, 2456, 2458,
2460, 2462, 2464, 2466, 2468, 2498, 2500, 2502, 2504, 2506, 2508, 2510, 2512, 2514, 2516,
2518, 2520, 2522, 2544, 2550, 2552, 2578, 2580, 2582, 2584, 2586, 2588, 2590, 2592, 2594,
2596, 2598, 2600, 2602, 2604, 2606, 2620, 2622, 2624, 2626, 2628, 2630, 2632, 2634, 2636,
2638, 2640, 2642, 2644, 2646, 2648, 2650, 2652, 2654, 2656, 2658, 2660, 2662, 2664, 2666,
2668, 2670, 2672, 2674, 2676, 2678, 2680, 2682, 2684, 2686, 2688, 2690, 2700, 2702, 2736,
2738, 2752, 2754, 2756, 2758, 2760, 2762, 2764, 2766, 2768, 2774, 2778, 2780, 2782, 2784,
2786, 2788, 2810, 2812, 2844, 2846, 2862, 2864, 2866, 2868,

TABLE 5
Sense strands with cross-species
compatibility with Human and Mouse MSH3
SENSE STRAND SEQ ID NOS/SENSE OLIGO NOS
384, 492, 494, 496, 498, 500, 502, 504, 506, 832, 1052, 1084, 1086,
1088, 1090, 1092, 1094, 1096, 1098, 1100, 1102, 1104, 1138, 1140,
1266, 1268, 1270, 1450, 1452, 1584, 1586, 1588, 1590, 1592, 1594,
1630, 1632, 1634, 1636, 1638, 1640, 1642, 1702, 1704, 1706, 1724,
1906, 1908, 1910, 1912, 1914, 1916, 1952, 1954, 1956, 1958, 1960,
1962, 1964, 1966, 1968, 1970, 1972, 1974, 1976, 1978, 1980, 1982,
1984, 2188, 2190, 2192, 2194, 2196, 2198, 2200, 2202

TABLE 6
Sense strands with cross-species
compatibility with Human and Rat MSH3
SENSE STRAND SEQ ID NOS/SENSE OLIGO NOS
82, 342, 344, 346, 492, 494, 496, 498, 500, 502, 504, 506, 520, 522,
524, 526, 528, 558, 560, 562, 564, 832, 1024, 1026, 1028, 1030, 1032,
1034, 1036, 1038, 1040, 1042, 1044, 1046, 1048, 1050, 1052, 1084, 1086,
1088, 1090, 1410, 1450, 1452, 1584, 1586, 1588, 1590, 1592, 1594, 1596,
1598, 1600, 1602, 1630, 1632, 1634, 1636, 1638, 1640, 1642, 1870, 1982,
1984, 2184, 2186, 2188

TABLE 7
Sense strands with cross-species
compatibility with Human, Cyno, and Mouse MSH3
SENSE STRAND SEQ ID NOS/SENSE OLIGO NOS
384, 492, 494, 496, 498, 500, 502, 504, 506, 832, 1052, 1084, 1086,
1088, 1090, 1092, 1094, 1096, 1098, 1100, 1102, 1104, 1138, 1140, 1266,
1268, 1270, 1450, 1452, 1584, 1586, 1588, 1590, 1592, 1630, 1632, 1634,
1636, 1638, 1640, 1642, 1702, 1704, 1706, 1724, 1906, 1908, 1910, 1912,
1914, 1916, 1952, 1954, 1956, 1958, 1960, 1962, 1964, 1966, 1968, 1970,
1972, 1974, 1976, 1978, 1980, 1982, 1984, 2188, 2190, 2192, 2194, 2196,
2198, 2200, 2202

TABLE 8
Sense strands with cross-species
compatibility with Human, Cyno, and Rat MSH3
SENSE STRAND SEQ ID NOS/SENSE OLIGO NOS
82, 342, 344, 346, 492, 494, 496, 498, 500, 502, 504, 506, 520, 522,
524, 526, 528, 558, 560, 562, 564, 832, 1024, 1026, 1028, 1030, 1032,
1034, 1036, 1038, 1040, 1042, 1044, 1046, 1048, 1050, 1052, 1084, 1086,
1088, 1090, 1410, 1450, 1452, 1584, 1586, 1588, 1590, 1592, 1630, 1632,
1634, 1636, 1638, 1640, 1642, 1870, 1982, 1984, 2184, 2186, 2188

TABLE 9
Sense strands with cross-species
compatibility with Human, Mouse, and Rat MSH3
SENSE STRAND SEQ ID NOS/SENSE OLIGO NOS
492, 494, 496, 498, 500, 502, 504, 506, 832, 1052, 1084, 1086, 1088,
1090, 1450, 1452, 1584, 1586, 1588, 1590, 1592, 1594, 1630, 1632, 1634,
1636, 1638, 1640, 1642, 1982, 1984, 2188

TABLE 10
Sense strands with cross-species
compatibility with Human, Cyno, Mouse, and Rat MSH3
SENSE STRAND SEQ ID NOS/SENSE OLIGO NOS
492, 494, 496, 498, 500, 502, 504, 506, 832, 1052, 1084, 1086, 1088,
1090, 1450, 1452, 1584, 1586, 1588, 1590, 1592, 1630, 1632, 1634, 1636,
1638, 1640, 1642, 1982, 1984, 2188

### Example 2. In Vitro Screening of MSH3 Knockdown

[0366] Inhibition or knockdown of MSH3 can be demonstrated using a cell-based assay. For example, HEK293, NIH3T3, or Hela or another available mammalian cell line with dsRNA agents targeting MSH3 identified above in Example 1 using at least five different dose levels, using transfection reagents such as lipofectamine 2000 (Invitrogen) following the manufacturer's instructions. Cells are harvested at multiple time points up to 7 days post transfection for either mRNA or protein analyses. Knockdown of mRNA and protein are determined by RT-qPCR or western blot analyses respectively, using standard molecular biology techniques as previously described (see, for example, as described in Drouet et al., 2014, PLOS One 9(6): e99341). The relative levels of the MSH3 mRNA and protein at the different dsRNA levels are compared with a mock oligonucleotide control. The most potent dsRNA agents (for example, those which are capable of at least 90%, at least 95%, at least 97%, at least 98%, or at least 99% or more, reduction, in protein levels when compared with controls) are selected for subsequent studies, for example, as described in the examples below.

[0367] Some siRNA duplexes were evaluated through mRNA knockdown at 10 nM and 0.5 nM, 24 hours after transfection of HeLa cells. The extent of mRNA knockdown by the siRNA duplexes was analyzed by quantitative reverse transcription polymerase chain reaction (RT-qPCR) using TaqMan Gene Expression probes. mRNA expression was calculated via delta-delta Ct(ΔΔCT) method were target expression was doubly normalized to express of the reference gene beta-glucuronidase (GUSB) and cells treated with non-targeting control siRNA.

[0368] In Table 11 below, the 5′ U of the antisense oligonucleotide can be any nucleotide (e.g., U, A, G, C, T). In some aspects, the 5′ U of the antisense oligonucleotide in Table 11 is U. The sense and antisense oligonucleotides in Table 11 each include a dTdT overhang on the 3′ end.

[0369] Additionally, every A and G in each sense oligonucleotide in Table 11 is a ribonucleotide. Every C and U in each sense oligonucleotide is a 2′-O-Methyl ribonucleotide.

[0370] Also, every A and G in each antisense oligonucleotide in Table 11 is a ribonucleotide. Every C and U preceding an A in the antisense oligonucleotide is a 2′-O-Methyl ribonucleotide, with one exception: U is the first nucleotide of the antisense strand, and it is a ribonucleotide.

[0371] Each nucleotide in the sense and antisense oligonucleotide in Table 11 is linked by a phosphate.

TABLE 11

| SEQ ID | | | | | | | | | |
|---|---|---|---|---|---|---|---|---|---|
| NO/ | | | | | | | | mean % | |
| SENSE | | | SEQ ID NO/ | | | | | mRNA | |
| OLIGO | | | ANTISENSE | | | | | remaining | |
| NO | Sense | Antisense | OLIGO NO | Pos | Cyno | Mouse | Rat | 0.5 nM | 10 nM |
| 118 | GUCCAGACAGAAUCUCUGA | UCAGAGAUUCUGUCUGGAC | 119 | 531 | Yes | No | No | 67.25 | 44.74 |
| 140 | GCCAAAAUGUACUGAUUUA | UAAAUCAGUACAUUUUGGC | 141 | 569 | Yes | No | No | 27.44 | 23.29 |
| 156 | AUGAUAUCAGUCUUCUACA | UGUAGAAGACUGAUAUCAU | 157 | 589 | Yes | No | No | 71.33 | 45.58 |
| 234 | AGUCAGUUUGGAUCAUCAA | UUGAUGAUCCAAACUGACU | 235 | 681 | Yes | No | No | 66.41 | 40.47 |
| 240 | UUGGAUCAUCAAAUACAAA | UUUGUAUUUGAUGAUCCAA | 241 | 688 | Yes | No | No | 66.56 | 37.87 |
| 246 | AUACAAGUCAUGAAAAUUA | UAAUUUUCAUGACUUGUAU | 247 | 700 | Yes | No | No | 66.57 | 42.32 |
| 304 | CGCUAGAAUUACAAUACAA | UUGUAUUGUAAUUCUAGCG | 305 | 772 | Yes | No | No | 67.39 | 41.15 |
| 308 | UAGAAUUACAAUACAUAGA | UCUAUGUAUUGUAAUUCUA | 309 | 775 | Yes | No | No | 65.28 | 35.66 |
| 350 | GUGGAAUGUGGAUAUAAGA | UCUUAUAUCCACAUUCCAC | 351 | 828 | Yes | No | No | 52.23 | 36.69 |
| 364 | GAUAUAAGUAUAGAUUCUA | UAGAAUCUAUACUUAUAUC | 365 | 838 | Yes | No | No | 66.91 | 35.40 |
| 380 | AGCCCGAGAGCUCAAUAUA | UAUAUUGAGCUCUCGGGCU | 381 | 878 | Yes | No | No | 63.05 | 35.36 |
| 382 | GCCCGAGAGCUCAAUAUUA | UAAUAUUGAGCUCUCGGGC | 383 | 879 | Yes | No | No | 40.56 | 30.67 |
| 386 | CGAGAGCUCAAUAUUUAUA | UAUAAAUAUUGAGCUCUCG | 387 | 882 | Yes | No | No | 40.50 | 26.99 |
| 388 | GAGAGCUCAAUAUUUAUUA | UAAUAAAUAUUGAGCUCUC | 389 | 883 | Yes | No | No | 48.94 | 28.07 |
| 396 | UUUAUUGCCAUUUAGAUCA | UGAUCUAAAUGGCAAUAAA | 397 | 895 | Yes | No | No | 45.93 | 26.42 |
| 406 | GCCAUUUAGAUCACAACUA | UAGUUGUGAUCUAAAUGGC | 407 | 901 | Yes | No | No | 36.86 | 16.73 |
| 418 | AGAUCACAACUUUAUGACA | UGUCAUAAAGUUGUGAUCU | 419 | 908 | Yes | No | No | 49.30 | 30.61 |
| 464 | CACAGACUGUUUGUUCAUA | UAUGAACAAACAGUCUGUG | 465 | 942 | Yes | No | No | 48.64 | 31.30 |
| 478 | CUGGUGGCAAAAGGAUAUA | UAUAUCCUUUUGCCACCAG | 479 | 969 | Yes | No | No | 46.40 | 29.04 |
| 520 | AUUAAAGGCCAUUGGAGAA | UUCUCCAAUGGCCUUUAAU | 521 | 1022 | Yes | No | No | 49.09 | 28.53 |
| 540 | CAACAGAAGUUCACUCUUA | UAAGAGUGAACUUCUGUUG | 541 | 1040 | Yes | No | No | 45.65 | 31.32 |
| 564 | AAAUUGACUGCCCUUUAUA | UAUAAAGGGCAGUCAAUUU | 565 | 1065 | Yes | No | No | 52.13 | 29.00 |
| 568 | UUGACUGCCCUUUAUACAA | UUGUAUAAAGGGCAGUCAA | 569 | 1068 | Yes | No | No | 47.91 | 31.00 |
| 618 | CUAAUCAAGCUGGAUGAUA | UAUCAUCCAGCUUGAUUAG | 619 | 1119 | Yes | No | No | 55.64 | 39.22 |
| 660 | ACUUCUACCAGCUAUCUUA | UAAGAUAGCUGGUAGAAGU | 661 | 1167 | Yes | No | No | 59.77 | 42.59 |
| 696 | AGGCGAGGUUGUGUUUGAA | UUCAAACACAACCUCGCCU | 697 | 1271 | Yes | No | No | 71.11 | 47.44 |
| 698 | GGCGAGGUUGUGUUUGAUA | UAUCAAACACAACCUCGCC | 699 | 1272 | Yes | No | No | 66.28 | 47.74 |
| 700 | GCGAGGUUGUGUUUGAUAA | UUAUCAAACACAACCUCGC | 701 | 1273 | Yes | No | No | 65.54 | 44.44 |
| 750 | CUUGUCCGAGCAAACAGAA | UUCUGUUUGCUCGGACAAG | 751 | 1373 | Yes | No | No | 48.42 | 33.40 |
| 770 | AGAGCCACAUCUGUUAGUA | UACUAACAGAUGUGGCUCU | 771 | 1404 | Yes | No | No | 47.87 | 31.94 |
| 822 | UGAAUACAGCCAUGCUUUA | UAAAGCAUGGCUGUAUUCA | 823 | 1469 | Yes | Yes | Yes | 44.77 | 23.02 |
| 830 | GCUUUCCAGGCAGUUACAA | UUGUAACUGCCUGGAAAGC | 831 | 1482 | Yes | No | No | 52.34 | 32.63 |
| 844 | GCAGUUACAGAGUUUUAUA | UAUAAAACUCUGUAACUGC | 845 | 1491 | Yes | No | No | 55.44 | 33.99 |
| 868 | ACAGUUGACAUCAAAGGUA | UACCUUUGAUGUCAACUGU | 869 | 1518 | Yes | No | No | 57.73 | 34.30 |
| 870 | CAGUUGACAUCAAAGGUUA | UAACCUUUGAUGUCAACUG | 871 | 1519 | Yes | No | No | 61.36 | 32.08 |
| 874 | GUUGACAUCAAAGGUUCUA | UAGAACCUUUGAUGUCAAC | 875 | 1521 | Yes | No | No | 60.17 | 31.68 |
| 904 | CUGGCAUUGUUAACUUAGA | UCUAAGUUAACAAUGCCAG | 905 | 1549 | Yes | No | No | 24.78 | 18.66 |
| 972 | CUCCAAACCUGAGAAUUUA | UAAAUUCUCAGGUUUGGAG | 973 | 1637 | Yes | No | No | 27.05 | 21.76 |
| 1004 | AUGGAAUUUAUGACAAUUA | UAAUUGUCAUAAAUUCCAU | 1005 | 1674 | Yes | No | No | 50.63 | 36.16 |
| 1042 | ACAGAAUCAGACUGAUAUA | UAUAUCAGUCUGAUUCUGU | 1043 | 1724 | Yes | No | No | 60.17 | 33.01 |
| 1060 | UGCUGUGGGUUUUAGACCA | UGGUCUAAAACCCACAGCA | 1061 | 1759 | Yes | No | Vo | 51.81 | 34.96 |
| 1062 | GCUGUGGGUUUUAGACCAA | UUGGUCUAAAACCCACAGC | 1063 | 1760 | Yes | No | No | 51.99 | 31.07 |
| 1064 | UGGGUUUUAGACCACACUA | UAGUGUGGUCUAAAACCCA | 1065 | 1764 | Yes | Yes | Yes | 120.87 | 320.61 |
| 1068 | GGUUUUAGACCACACUAAA | UUUAGUGUGGUCUAAAACC | 1069 | 1766 | Yes | Yes | Yes | 65.36 | 35.69 |
| 1090 | UUGGGAGACGGAAGUUAAA | UUUAACUUCCGUCUCCCAA | 1091 | 1792 | Yes | No | No | 57.77 | 30.99 |
| 1096 | GACGGAAGUUAAAGAAGUA | UACUUCUUUAACUUCCGUC | 1097 | 1798 | Yes | No | No | 36.69 | 31.20 |
| 1098 | ACGGAAGUUAAAGAAGUGA | UCACUUCUUUAACUUCCGU | 1099 | 1799 | Yes | No | No | 50.65 | 30.92 |
| 1114 | CACUCCUUAAAUUAAGGGA | UCCCUUAAUUUAAGGAGUG | 1115 | 1828 | Yes | No | No | 54.62 | 41.66 |
| 1116 | ACUCCUUAAAUUAAGGGAA | UUCCCUUAAUUUAAGGAGU | 1117 | 1829 | Yes | No | No | 52.74 | 37.90 |
| 1166 | UCCAUUCAGAAUCUAGUGA | UCACUAGAUUCUGAAUGGA | 1167 | 1882 | Yes | No | No | 56.52 | 36.88 |
| 1168 | CCAUUCAGAAUCUAGUGUA | UACACUAGAUUCUGAAUGG | 1169 | 1883 | Yes | No | No | 55.00 | 40.41 |
| 1170 | AUUCAGAAUCUAGUGUGUA | UACACACUAGAUUCUGAAU | 1171 | 1885 | Yes | No | No | 56.34 | 36.81 |
| 1182 | AUCUAGUGUGUUUGGUCAA | UUGACCAAACACACUAGAU | 1183 | 1892 | Yes | No | No | 49.97 | 32.53 |
| 1192 | GUGUUUGGUCAGAUAGAAA | UUUCUAUCUGACCAAACAC | 1193 | 1899 | Yes | No | No | 55.26 | 34.88 |
| 1212 | UAGAAAAUCAUCUACGUAA | UUACGUAGAUGAUUUUCUA | 1213 | 1912 | Yes | No | No | 48.24 | 30.58 |
| 1214 | AGAAAAUCAUCUACGUAAA | UUUACGUAGAUGAUUUUCU | 1215 | 1913 | Yes | No | No | 54.57 | 36.51 |
| 1216 | AAAAUCAUCUACGUAAAUA | UAUUUACGUAGAUGAUUUU | 1217 | 1915 | Yes | No | No | 53.87 | 38.28 |
| 1222 | AUCAUCUACGUAAAUUGCA | UGCAAUUUACGUAGAUGAU | 1223 | 1918 | Yes | No | No | 47.43 | 34.83 |
| 1244 | GGACUCUGUAGCAUUUAUA | UAUAAAUGCUACAGAGUCC | 1245 | 1950 | Yes | No | No | 50.88 | 31.70 |
| 1258 | UACCCAAGAGUUCUUCUUA | UAAGAAGAACUCUUGGGUA | 1259 | 1982 | Yes | Yes | No | 55.68 | 47.62 |
| 1292 | UCACCUAAAGUCAGAAUUA | UAAUUCUGACUUUAGGUGA | 1293 | 2018 | Yes | No | No | 58.53 | 46.28 |
| 1358 | CCGUUAUUUUAGAAAUUCA | UGAAUUUCUAAAAUAACGG | 1359 | 2089 | Yes | No | No | 44.55 | 25.12 |
| 1360 | CGUUAUUUUAGAAAUUCCA | UGGAAUUUCUAAAAUAACG | 1361 | 2090 | Yes | No | No | 27.08 | 17.25 |
| 1374 | GUCCAGUGGAGCAUUACUA | UAGUAAUGCUCCACUGGAC | 1375 | 2119 | Yes | No | No | 51.19 | 41.54 |
| 1378 | AGUGGAGCAUUACUUAAAA | UUUUAAGUAAUGCUCCACU | 1379 | 2123 | Yes | No | No | 56.98 | 42.84 |
| 1380 | GUGGAGCAUUACUUAAAGA | UCUUUAAGUAAUGCUCCAC | 1381 | 2124 | Yes | No | No | 51.30 | 42.74 |
| 1400 | GAACAAGCUGCCAAAGUUA | UAACUUUGGCAGCUUGUUC | 1401 | 2151 | Yes | No | No | 48.03 | 34.27 |
| 1488 | UCCGAAUGCAUUUGCAAGA | UCUUGCAAAUGCAUUCGGA | 1489 | 2257 | Yes | No | No | 67.83 | 43.62 |
| 1500 | CUUCUGCACAAUAUGUGAA | UUCACAUAUUGUGCAGAAG | 1501 | 2299 | Yes | No | No | 64.86 | 38.80 |
| 1610 | AGCUAGUCCUUGACUGCAA | UUGCAGUCAAGGACUAGCU | 1611 | 2473 | Yes | Yes | Yes | 55.51 | 29.25 |
| 1682 | AAAGCAGUGCAUCACCUAA | UUAGGUGAUGCACUGCUUU | 1683 | 2547 | Yes | No | No | 59.92 | 38.41 |
| 1684 | GUGCAUCACCUAGCAACUA | UAGUUGCUAGGUGAUGCAC | 1685 | 2553 | Yes | No | No | 56.67 | 38.49 |
| 1748 | GCAGACCAACUGUACAAGA | UCUUGUACAGUUGGUCUGC | 1749 | 2620 | Yes | No | No | 56.19 | 35.33 |
| 1782 | CUGGGAGAACAGGAUCAAA | UUUGAUCCUGUUCUCCCAG | 1783 | 2691 | Yes | No | No | 57.75 | 36.78 |
| 1788 | GAGAACAGGAUCAAUAUGA | UCAUAUUGAUCCUGUUCUC | 1789 | 2695 | Yes | No | No | 73.61 | 43.21 |
| 1790 | AGAACAGGAUCAAUAUGUA | UACAUAUUGAUCCUGUUCU | 1791 | 2696 | Yes | No | No | 64.89 | 39.40 |
| 1826 | GGACUCAGAGAGAGUAAUA | UAUUACUCUCUCUGAGUCC | 1827 | 2738 | Yes | No | | 70.45 | 38.70 |
| 1866 | GAGCUCCUACAUAAAACAA | UUGUUUUAUGUAGGAGCUC | 1867 | 2786 | Yes | No | No | 55.61 | 36.30 |
| 1868 | AGCUCCUACAUAAAACAAA | UUUGUUUUAUGUAGGAGCU | 1869 | 2787 | Yes | No | No | 59.92 | 40.71 |
| 1870 | GCUCCUACAUAAAACAAGA | UCUUGUUUUAUGUAGGAGC | 1871 | 2788 | Yes | No | No | 28.05 | 23.06 |
| 1882 | AAAACAAGUUGCAUUGAUA | UAUCAAUGCAACUUGUUUU | 1883 | 2798 | Yes | No | No | 57.83 | 38.63 |
| 1892 | AGUUGCAUUGAUUACCAUA | UAUGGUAAUCAAUGCAACU | 1893 | 2804 | Yes | No | No | 49.53 | 31.05 |
| 1926 | GCAGAAGAAGCGACAAUUA | UAAUUGUCGCUUCUUCUGC | 1927 | 2850 | Yes | No | No | 46.34 | 30.70 |
| 1946 | GAUUGUGGAUGGCAUUUUA | UAAAAUGCCAUCCACAAUC | 1947 | 2870 | Yes | Yes | No | 51.01 | 29.16 |
| 1964 | GGGUGCUGCAGACAAUAUA | UAUAUUGUCUGCAGCACCC | 1965 | 2897 | Yes | Yes | Yes | 43.17 | 37.54 |
| 1970 | CUGCAGACAAUAUAUAUAA | UUAUAUAUAUUGUCUGCAG | 1971 | 2902 | Yes | No | No | 49.75 | 35.31 |
| 2022 | CAUCACAGUCCUUGGUUAA | UUAACCAAGGACUGUGAUG | 2023 | 2980 | Yes | No | No | 48.00 | 32.17 |
| 2026 | CACAGUCCUUGGUUAUCUA | UAGAUAACCAAGGACUGUG | 2027 | 2983 | Yes | No | No | 48.28 | 31.26 |
| 2030 | CAGUCCUUGGUUAUCUUGA | UCAAGAUAACCAAGGACUG | 2031 | 2985 | Yes | No | No | 50.46 | 36.22 |
| 2084 | UUGCCUAUGCUACACUUGA | UCAAGUGUAGCAUAGGCAA | 2085 | 3046 | Yes | No | No | 48.14 | 33.67 |
| 2088 | CUAUGCUACACUUGAGUAA | UUACUCAAGUGUAGCAUAG | 2089 | 3050 | Yes | No | No | 41.87 | 31.74 |
| 2090 | UAUGCUACACUUGAGUAUA | UAUACUCAAGUGUAGCAUA | 2091 | 3051 | Yes | No | No | 46.64 | 33.27 |
| 2094 | CUACACUUGAGUAUUUCAA | UUGAAAUACUCAAGUGUAG | 2095 | 3055 | Yes | No | No | 48.56 | 32.59 |
| 2124 | UGUGAAAUCCUUAACCCUA | UAGGGUUAAGGAUUUCACA | 2125 | 3080 | Yes | No | No | 52.19 | 35.19 |
| 2130 | AUCCUUAACCCUGUUUGUA | UACAAACAGGGUUAAGGAU | 2131 | 3086 | Yes | No | No | 52.13 | 32.29 |
| 2146 | UUUGUCACCCAUUAUCCGA | UCGGAUAAUGGGUGACAAA | 2147 | 3099 | Yes | No | No | 49.33 | 27.75 |
| 2194 | GAAUUACCACAUGGGAUUA | UAAUCCCAUGUGGUAAUUC | 2195 | 3158 | Yes | Yes | No | 51.85 | 35.54 |
| 2200 | UACCACAUGGGAUUCUUGA | UCAAGAAUCCCAUGUGGUA | 2201 | 3162 | Yes | Yes | No | 49.91 | 34.14 |
| 2204 | CCACAUGGGAUUCUUGGUA | UACCAAGAAUCCCAUGUGG | 2205 | 3164 | Yes | Yes | No | 49.75 | 33.43 |
| 2264 | UCCUUUACCAAAUAACUAA | UUAGUUAUUUGGUAAAGGA | 2265 | 3244 | Yes | No | No | 49.51 | 34.46 |
| 2290 | GCAAGGAGUUAUGGAUUAA | UUAAUCCAUAACUCCUUGC | 2291 | 3273 | Yes | No | No | 46.01 | 32.27 |
| 2308 | UUAAAUGUGGCUAAACUAA | UUAGUUUAGCCACAUUUAA | 2309 | 3288 | Yes | No | No | 46.98 | 33.49 |
| 2318 | GUGGCUAAACUAGCAGAUA | UAUCUGCUAGUUUAGCCAC | 2319 | 3294 | Yes | No | No | 33.99 | 28.52 |
| 2324 | AAAGCAGCUCACAAGUCAA | UUGACUUGUGAGCUGCUUU | 2325 | 3333 | Yes | No | No | 52.22 | 31.71 |
| 2338 | GAAGGAUUAAUAAAUACGA | UCGUAUUUAUUAAUCCUUC | 2339 | 3360 | Yes | No | No | 28.47 | 23.20 |
| 2386 | AGUUAUGGACGAUGCAUAA | UUAUGCAUCGUCCAUAACU | 2387 | 3406 | Yes | No | No | 63.89 | 34.90 |
| 2388 | GUUAUGGACGAUGCAUAAA | UUUAUGCAUCGUCCAUAAC | 2389 | 3407 | Yes | No | No | 53.12 | 34.65 |
| 2390 | GGACGAUGCAUAAUGCACA | UGUGCAUUAUGCAUCGUCC | 2391 | 3412 | Yes | No | No | 65.37 | 30.59 |
| 2392 | GACGAUGCAUAAUGCACAA | UUGUGCAUUAUGCAUCGUC | 2393 | 3413 | Yes | No | No | 71.34 | 51.55 |
| 2466 | ACUGUACAAAAUAACUCUA | UAGAGUUAUUUUGUACAGU | 2467 | 3542 | Yes | No | No | 73.70 | 46.89 |
| 2606 | UAGACUUCCACUUUGUAAA | UUUACAAAGUGGAAGUCUA | 2607 | 3704 | Yes | No | No | 59.07 | 40.22 |
| 2608 | GACUUCCACUUUGUAAUUA | UAAUUACAAAGUGGAAGUC | 2609 | 3706 | Yes | No | No | 62.67 | 36.70 |
| 2610 | ACUUCCACUUUGUAAUUAA | UUAAUUACAAAGUGGAAGU | 2611 | 3707 | Yes | No | No | 58.14 | 41.10 |
| 2632 | GACAGUAAGUCCAGUAAAA | UUUUACUGGACUUACUGUC | 2633 | 3737 | Yes | No | No | 56.92 | 35.95 |
| 2652 | CCAGUAAAGCCUUAAGUGA | UCACUUAAGGCUUUACUGG | 2653 | 3747 | Yes | No | No | 84.65 | 66.02 |
| 2678 | AUAAUUCCCAAGCUUUUGA | UCAAAAGCUUGGGAAUUAU | 2679 | 3772 | Yes | No | No | 59.06 | 38.31 |
| 2690 | CUUUUGGAGGGUGAUAUAA | UUAUAUCACCCUCCAAAAG | 2691 | 3784 | Yes | No | No | 58.68 | 35.99 |
| 2758 | CACCAAGAACAUAAGAAUA | UAUUCUUAUGUUCUUGGUG | 2759 | 3914 | Yes | No | No | 58.28 | 36.18 |

### Example 3. In Vitro Screen for Reduced Expansion

[0372] Expansion of DNA triplet repeats can be replicated in vitro using patient-derived cells lines and DNA-damaging agents. Human fibroblasts from Huntington's (GM04281, GM04687 and GM04212) or Friedreich's Ataxia patients (GM03816 and GM02153) or Myotonic dystrophy1 (GM04602, GM03987 and GM03989) are purchased from Coriell Cell Repositories and are maintained in medium following the manufacturer's instructions (Kovtum et al., 2007 Nature, 447(7143): 447-452; Li et al., 2016 Biopreservation and Biobanking 14(4):324-29; Zhang et al., 2013 Mol Ther 22(2): 312-320). To induce CAG-repeat expansion in vitro, fibroblast cells are treated with oxidizing agents such as hydrogen peroxide (H₂O₂), potassium chromate (K₂CrO₄) or potassium bromate (KBrO₃) for up to 2 hrs (Kovtum et al., ibid). Cells are washed, and medium replace to allow cells to recover for 3 days. The treatment is repeated up to twice more before cells are harvested and DNA isolated. CAG repeat length is determined using methods described below. The effect of dsRNA agents on altering CAG-repeat expansion is measured at different concentrations and is compared with controls (mock-transfected and/or control dsRNA at the same concentration as the experimental agent).

### Example 4. Genomic DNA Extraction and Quantitation of CAG Repeat Length by Small Pool-PCR (Sp-PCR) Analyses

[0373] Genomic DNA is purified using standard Proteinase K digestions and extracted using DNAzol (Invitrogen) following the manufacturer's instructions. CAG repeat length is determined by small pool-PCR analyses as previously described (Mario Gomes-Pereira and Darren Monckton, 2017, Front Cell Neuro 11:153). In brief, DNA is digested with HindIII, diluted to a final concentration between 1-6 pg/μl and approximately 10 pg was used in subsequent PCR reactions. Primer flanking Exon 1 of the human HTT are used to amplify the CAG alleles and the PCR product is resolved by electrophoresis. Subsequently, Southern blot hybridization is performed, and the CAG alleles are observed by autoradiography OR visualized with ethidium bromide staining. CAG length can be measured directly by sequencing on a MiSeQ or appropriate machine. The change in CAG repeat number in various treatment groups in comparison with controls is calculated using simple descriptive statistics (e.g., mean±standard deviation).

### Example 5. Mouse Studies

[0374] Mouse models recapitulating many of the features of trinucleotide repeat expansion diseases including, HD, FA and DM1, are readily available from commercial and academic institutions (Polyglutamine Disorders, Advances in Experimental Medicine and Biology, Vol 1049, 2018: Editors Clevio Nobrega and Lois Pereira de Almeida, Springer). All mouse experiments are conducted in accordance with local IACUC guidelines. Three examples of different diseased mouse models and how they could be used to investigate the usefulness of pharmacological intervention against MSH3 for somatic expansion are included below.

[0375] In Huntington's research, several transgenic and knock-in mouse models were generated to investigate the underlying pathological mechanisms involved in the disease. For example, the R2/6 transgenic mouse contains a transgene of ˜1.9 kb of human HTT containing 144 copies of the CAG repeat (Mangiarini et al., 1996 Cell 87: 493-506) while the HdhQ111 model was generated by replacing the mouse HTT exon 1 with a human exon1 containing 111 copies of the CAG repeat (Wheeler et al., 2000 Hum Mol Genet 9:503-513). Both the R2/6 and HdhQ111 models replicate many of the features of human HD including motor and behavioral dysfunctions, neuronal loss, as well as the expansion of CAG repeats in the striatum (Pouladi et al., 2013, Nature Reviews Neuroscience 14: 708-721; Mangiarini et al., 1997 Nature Genet 15: 197-200; Wheeler et al., Hum Mol Genet 8: 115-122). HD Mice are genotyped using DNA derived from tail snips at weaning and the CAG repeat size is determined. Mice are randomized into groups (n=5/group) at weaning at 4 wks old and dosed with a single ICV injection of either up to a 500 μg dose of dsRNA agents (optionally encapsulated in lipid nanoparticle (LNP)) targeting MSH3 or control dsRNA agents (also optionally encapsulated in LNP). A series of dsRNA agents targeting different regions of MSH3 are tested to identify the most efficacious oligo sequence in vivo. At 12 wks of age, mice are euthanized, and tissues extracted for analyses. The list of tissues includes, but not restricted to, striatum, cortex, cerebellum, and liver. Genomic DNA is extracted and the length of CAG repeats measured as described below, and the extent of CAG repeats compared with control mice. Additional pertinent mouse models of HD can be considered.

[0376] In Friedreich Ataxia, the YG8 FRDA transgenic mouse model is commonly used to understand the pathology (Al-Mandawi et al., 2006 Genomics 88(5)580-590; Bourn et al., 2012 PLOS One 7(10); e47085). This model was generated through the insertion of a human YAC transgenic containing in the background of a null FRDA mouse. The YG8 model demonstrates somatic expansion of the GAA triplet repeat expansion in neuronal tissues with only mild motor defects. YG8 FRDA mice are genotyped using DNA derived from tail snips at weaning and the CAG repeat size is determined using methods. To determine if MSH3 plays a role in somatic expansion of the disease allele, hemizygous YG8 FRDA animals are administered ICV with dsRNA agents targeting MSH3 or control dsRNA agents (both optionally encapsulated in LNP) targeting knockdown of MSH3 identified above.

[0377] Approximately 2 months later, animals are euthanized and tissues collected for molecular analyses. Suitable tissues are heart, quadriceps, dorsal root ganglia (DRG's), cerebellum, kidney, and liver. Genomic DNA is extracted and the length of CAG repeats compared in MSH3 and control dsRNA groups as described above in Example 4.

[0378] In Myotonic dystrophy, the DM300-328 transgenic mouse model is suitable for investigating the pathology behind DM1. This mouse model has a large human genomic sequence (˜45 kb) containing over 300 CTG repeats and displays both the somatic expansion and degenerative muscle changes observed in human DM1 (Seznec et al., 2000; Tome et al., 2009 PLOS Genetics 5(5): e1000482; Pandey et al., 2015 J Pharmacol Exp Ther 355:329-340). DM300-328 mice are genotyped using DNA derived from tail snips at weaning and the CAG repeat size is determined. To determine if MSH3 plays a role in somatic expansion of the disease allele in myotonic dystrophy, DM300-328 transgenic animals are administered ASOs targeting knockdown of MSH3 by either subcutaneous injections (sc), intraperitoneal (ip) or intravenous tail injections (iv). Mice are administered with MSH3 or control dsRNA agents (optionally encapsulated in LNP) up to 2×/week for maximum 8 weeks of treatment. Animals are euthanized at multiple time points and tissues collected for molecular analyses. Suitable tissues are quadriceps, heart, diaphragm, cortex, cerebellum, sperm, kidney, and liver. Genomic DNA is extracted and the length of CAG repeats measured and compared with parallel controls.

[0379] The Hdh^{Q111} mouse model for Huntington Disease is a heterozygous knock-in line, in which the majority of exon 1 and part of intron 1 on one allele of the huntingtin gene (i.e., HTT or Huntington Disease gene) are replaced with human DNA containing ˜111 CAG repeats. In this example, ASOs to knock down MSH3 activity or levels is administered. After a treatment period, brain tissue from treated or untreated mice is isolated (e.g., striatum tissue) and analyzed using qRT-PCR as previously described to determine RNA levels of MSH3. Huntingtin gene repeat analysis is performed using mouse tissues (e.g., striatum tissue) after a treatment period using a human-specific PCR assay that amplifies the HTT CAG repeat from the knock-in allele but does not amplify the mouse sequence (i.e., the wild type allele). In this protocol, the forward primer is fluorescently labeled (e.g., with 6-FAM as described previously, for example Pinto R M, Dragileva E, Kirby A, et al. Mismatch repair genes MLH1 and MSH3 modify CAG instability in Huntington's disease mice: genome-wide and candidate approaches. PLoS Genet. 2013; 9(10):e1003930.), and products can be resolved using an analyzer with comparison against an internal size standard to generate CAG repeat size distribution traces. Repeat size is determined from the peak with the greatest intensity from a control tissue (e.g., tail tissue in a mouse) and from an affected tissue (e.g., brain striatum tissue or brain cortex tissue). Immunohistochemistry is carried out with polyclonal anti-huntingtin antibody (e.g., EM48) on paraffin-embedded or otherwise prepared sections of brain tissue and can be quantified using a standardized staining index to capture both nuclear staining intensity and number of stained nuclei. A decrease in repeat size in affected tissue when compared with controls indicates that the agent that reduces the level and/or activity of MSH3 is capable of decreasing the repeat which are responsible for the toxic and/or defective gene products in Huntington's disease.

### Example 6. In Vitro Screening of MSH3 Knockdown

[0380] Knockdown of MSH3 in HeLa cells transfected with 10 nM dsRNA is shown in Table 12.

[0381] Two different screening protocols were utilized to screen for siRNA duplexes targeting human MSH3 to determine MSH3 knockdown, as described below.

### Screening Protocol 1

### Human Cell Lines

[0382] All human MSH3 targets have been screened in HeLa cells. HeLa cells were obtained from the ATCC (ATCC in partnership with LGC Standards, Wesel, Germany, cat. #ATCC-CRM-CCL-2) and cultured in HAM's F12 (#FG0815, Biochrom, Berlin, Germany), supplemented to contain 10% fetal calf serum (1248D, Biochrom GmbH, Berlin, Germany), and 100 U/ml Penicillin/100 μg/ml Streptomycin (A2213, Biochrom GmbH, Berlin, Germany) at 37° C. in an atmosphere with 5% CO2 in a humidified incubator. For transfection of HeLa cells with siRNAs, cells were seeded at a density of 15,000 cells/well into 96-well tissue culture plates (#655180, GBO, Germany).

[0383] PC3 cells were obtained from ATCC (ATCC in partnership with LGC Standards, Wesel, Germany, cat. #ATCC-CRL-1435) and cultured in RPMI 1640 (#FG1215, Biochrom, Berlin, Germany), supplemented to contain 10% fetal calf serum (#1248D, Biochrom GmbH, Berlin, Germany), 25 mM Hepes (#1615, Biochrom, Berlin, Germany), 1×non-essential amino acids (#K0293; Biochrom, Berlin, Germany), 1 mM Na-Pyruvate (#10473; Biochrom, Berlin, Germany) and 100 U/ml Penicillin/100 μg/ml Streptomycin (A2213, Biochrom GmbH, Berlin, Germany) at 37° C. in an atmosphere with 5% CO2 in a humidified incubator. For transfection of PC3 cells with siRNAs, cells were seeded at a density of 15,000 cells/well into 96-well tissue culture plates (#655180, GBO, Germany).

### Transfection

[0384] In all cell lines used, transfection of siRNA was carried out with Lipofectamine RNAiMax (Invitrogen/Life Technologies, Karlsruhe, Germany) according to the manufacturer's instructions for reverse transfection. The dual dose screen was performed with siRNAs in quadruplicates at 10 nM and 0.5 nM, respectively, with siRNAs targeting Aha1, Firefly-Luciferase and Factor VII as unspecific controls and a mock transfection. Dose-response experiments were done with siRNA in 10 concentrations transfected in quadruplicates, starting at 100 nM in 6-fold dilutions steps down to ˜10 fM. Mock transfected cells served as control in DRC experiments. After 24 h of incubation with siRNAs, medium was removed and cells were lysed in 150 μl Medium-Lysis Mixture (1 volume lysis mixture, 2 volumes cell culture medium) and then incubated at 53° C. for 30 minutes. bDNA assay was performed according to manufacturer's instructions. Luminescence was read using 1420 Luminescence Counter (WALLAC VICTOR Light, Perkin Elmer, Rodgau-Jügesheim, Germany) following 30 minutes incubation at RT in the dark.

[0385] The Aha1-siRNA served at the same time as an unspecific control for respective target mRNA expression and as a positive control to analyze transfection efficiency with regards to Aha1 mRNA level. By hybridization with an Aha1 probeset, the other two target-unspecific controls served as controls for Aha1 mRNA level. Transfection efficiency for each 96-well plate and both doses in the dual dose screen was calculated by relating Aha1-level in wells with Aha1-siRNA (normalized to GapDH) to Aha1-level obtained with controls.

[0386] For each well, the target mRNA level was normalized to the respective GAPDH mRNA level. The activity of a given siRNA was expressed as percent mRNA concentration of the respective target (normalized to GAPDH mRNA) in treated cells, relative to the target mRNA concentration (normalized to GAPDH mRNA) averaged across control wells.

### Protocol 2

### 1. Cell Seeding Density Evaluation

[0387] HeLa cells were optimized for growth rate over 72 h in 384 well plate format. The optimal cell seeding density was 5,000 HeLa cells per well. This allowed for efficient reverse transfection and sufficient mRNA to be measured by RTqPCR

### 2. Transfection Optimization

[0388] HeLa cells were reverse transfected with 10 nM and 25 nM siRNA for the following controls: NT2 (siGENOME Non-targeting Control siRNA #2, Dharmacon D-001210-02) and siTox (AllStars Hs Cell Death Control siRNA, Qiagen SI04381048) with concentrations of Lipofectamine RNAiMAX (Catalog #13778150, ThermoFisher Scientific) ranging from 0.03-0.25 μL per well. Transfection was performed in four replicates per control and per amount of Lipofectamine RNAiMAX. After 72 h the viability of the HeLa cells were measured using CTG2.0 Assay (CellTitre-Glo 2.0, Promega G924C) according to manufacturer's instructions. Briefly, a reagent volume equal to the amount of media was added per well, followed by a five-minute lysis reaction on an orbital shaker. Following a ten-minute incubation at room temperature, luminescence was measured. Lipofectamine RNAiMAX transfection reagent concentration was optimised at 0.12 μL per well (in a 384 well plate).

### 3. RT-qPCR Assay Optimization:

[0389] HeLa cells were reverse transfected with 10 nM and 0.5 nM siRNA for the following controls: NT2 (siGENOME Non-targeting Control siRNA #2, Dharmacon D-001210-02) and siGAPDH (siGENOME GAPDH, Dharmacon M-004253-02) using Lipofectamine RNAiMAX at 0.12 μL per well (in a 384 well plate). Twenty fours after transfection, cells were processed for RT-qPCR read-out using the Cellsto-CT 1-step TaqMan Kit (Invitrogen 4391852C and 4444436) following the manufacturer's instructions.

[0390] Briefly, cells were washed with 50 μl PBS and then lysed in 20 μl Lysis solution containing DNase I. After 5 min, lysis was stopped by addition of 2 μl STOP Solution for 2 min. Lysates were kept at −20° C. until RT-qPCR analysis or on ice for immediate RT-qPCR analysis. Cell lysates were diluted 1:1 with H2O. 3 μl of lysate was used as template in a 11 μl reaction volume.

[0391] Expression levels of GAPDH (TaqMan 4310884E) and GUSB (TaqMan 4333767F) were determined using RT-qPCR (Cells-to-CT 1-step TaqMan Kit) on a QuantStudio 6 (QS6) thermocycling instrument (Applied BioSystems). Relative quantification was determined using the ΔΔCT method, where a duplexed control GUSB was used and expression changes normalized to the reference sample (plate average of negative control siRNA transfected cells) set to 1.

### 4. RNAi Screen

[0392] All 1080 siRNA duplexes were resuspended in UltraPure DNase and RNase free distilled water (Invitrogen, 10977035) at 1000-fold their final assay concentration (10 μM or 0.5 μM). siRNA duplexes were dispensed in quadruplicates at 25 nL per well using the Echo 525 acoustic dispenser (LabCyte). These assay plates containing siRNA duplexes were stored at −80° C. until reverse transfection of siRNA duplexes were allowed to complex with 5 μL of Lipofectamine RNAiMAX for 20 minutes before HeLa cells were added at 5,000 cells per well (20 μl). Assay plates were kept in a cell culture incubator for 24 hours. RT-qPCR readout (using Cells-to-CT 1-step TaqMan protocol) was performed as described above.

[0393] The sense and antisense oligonucleotides of Table 12 each contain a dTdT overhang on the 3′ end. Additionally, every A and G in each sense oligonucleotide in Table 12 is a ribonucleotide. Every C and U in each sense oligonucleotide is a 2′-O-Methyl ribonucleotide.

[0394] Also, every A and G in each antisense oligonucleotide in Table 12 is a ribonucleotide. Every C and U preceding an A in the antisense oligonucleotide is a 2′-O-Methyl ribonucleotide, with one exception: U is the first nucleotide of the antisense strand, and it is a ribonucleotide.

[0395] Each nucleotide in the sense and antisense oligonucleotide in Table 12 is linked by a phosphate.

TABLE 12

| SEQ | | | | | | | |
|---|---|---|---|---|---|---|---|
| ID | | | | | | | |
| NO/ | | | SEQ | Coordinates | | Mean % mRNA | |
| SENSE | | | ID NO/ | in | | remaining | |
| OLIGO | | | ANTISENSE | NM_002439.4 | | | Std. |
| NO | Sense | Antisense | OLIGO NO | Begin | End | Mean | Dev. |
| 78 | ACUCUGAGCCAAAGAAAUA | UAUUUCUUUGGCUCAGAGU | 79 | 433 | 450 | 29.16% | 1.30% |
| 82 | UGAGCCAAAGAAAUGUCUA | UAGACAUUUCUUUGGCUCA | 83 | 437 | 454 | 28.48% | 3.21% |
| 104 | CUGCCCUUCCUCAAAGUAA | UUACUUUGAGGAAGGGCAG | 105 | 511 | 528 | 66.45% | 13.29% |
| 148 | AGUUCUGCCAAAAUGUACA | UGUACAUUUUGGCAGAACU | 149 | 563 | 580 | 41.92% | 0.95% |
| 158 | GUACUGAUUUUGAUGAUAA | UUAUCAUCAAAAUCAGUAC | 159 | 577 | 594 | 34.73% | 1.63% |
| 160 | ACUGAUUUUGAUGAUAUCA | UGAUAUCAUCAAAAUCAGU | 161 | 579 | 596 | 39.18% | 6.08% |
| 190 | AAGAAUGCAGUUUCUUCUA | UAGAAGAAACUGCAUUCUU | 191 | 612 | 629 | 34.71% | 1.43% |
| 240 | CAGUUUGGAUCAUCAAAUA | UAUUUGAUGAUCCAAACUG | 241 | 684 | 701 | 34.87% | 0.56% |
| 244 | GUUUGGAUCAUCAAAUACA | UGUAUUUGAUGAUCCAAAC | 245 | 686 | 703 | 30.29% | 0.25% |
| 246 | UUUGGAUCAUCAAAUACAA | UUGUAUUUGAUGAUCCAAA | 247 | 687 | 704 | 36.80% | 5.06% |
| 250 | UGGAUCAUCAAAUACAAGA | UCUUGUAUUUGAUGAUCCA | 251 | 689 | 706 | 42.39% | 1.25% |
| 252 | GGAUCAUCAAAUACAAGUA | UACUUGUAUUUGAUGAUCC | 253 | 690 | 707 | 37.57% | 4.10% |
| 260 | UACAAGUCAUGAAAAUUUA | UAAAUUUUCAUGACUUGUA | 261 | 701 | 718 | 33.20% | 3.47% |
| 308 | CCGCUAGAAUUACAAUACA | UGUAUUGUAAUUCUAGCGG | 309 | 771 | 788 | 28.38% | 2.64% |
| 314 | AGAAUUACAAUACAUAGAA | UUCUAUGUAUUGUAAUUCU | 315 | 776 | 793 | 28.83% | 0.31% |
| 316 | GAAUUACAAUACAUAGAAA | UUUCUAUGUAUUGUAAUUC | 317 | 777 | 794 | 33.30% | 2.34% |
| 354 | GUGUGGAAUGUGGAUAUAA | UUAUAUCCACAUUCCACAC | 355 | 826 | 843 | 41.99% | 10.04% |
| 356 | UGUGGAAUGUGGAUAUAAA | UUUAUAUCCACAUUCCACA | 357 | 827 | 844 | 28.56% | 4.30% |
| 360 | UGGAAUGUGGAUAUAAGUA | UACUUAUAUCCACAUUCCA | 361 | 829 | 846 | 29.53% | 4.53% |
| 362 | GGAAUGUGGAUAUAAGUAA | UUACUUAUAUCCACAUUCC | 363 | 830 | 847 | 51.52% | 3.12% |
| 364 | GAAUGUGGAUAUAAGUAUA | UAUACUUAUAUCCACAUUC | 365 | 831 | 848 | 23.70% | 0.44% |
| 368 | AUGUGGAUAUAAGUAUAGA | UCUAUACUUAUAUCCACAU | 369 | 833 | 850 | 28.60% | 3.91% |
| 370 | UGUGGAUAUAAGUAUAGAA | UUCUAUACUUAUAUCCACA | 371 | 834 | 851 | 56.11% | 7.06% |
| 372 | UGGAUAUAAGUAUAGAUUA | UAAUCUAUACUUAUAUCCA | 373 | 836 | 853 | 66.22% | 6.36% |
| 396 | GAGCUCAAUAUUUAUUGCA | UGCAAUAAAUAUUGAGCUC | 379 | 885 | 902 | 37.54% | 3.89% |
| 414 | UUUAGAUCACAACUUUAUA | UAUAAAGUUGUGAUCUAAA | 415 | 905 | 922 | 37.46% | 0.99% |
| 416 | UUAGAUCACAACUUUAUGA | UCAUAAAGUUGUGAUCUAA | 417 | 906 | 923 | 50.98% | 4.13% |
| 418 | UAGAUCACAACUUUAUGAA | UUCAUAAAGUUGUGAUCUA | 419 | 907 | 924 | 28.29% | 0.22% |
| 474 | GGUGGCAAAAGGAUAUAAA | UUUAUAUCCUUUUGCCACC | 475 | 971 | 988 | 28.32% | 2.21% |
| 476 | GUGGCAAAAGGAUAUAAGA | UCUUAUAUCCUUUUGCCAC | 477 | 972 | 989 | 33.27% | 0.44% |
| 478 | UGGCAAAAGGAUAUAAGGA | UCCUUAUAUCCUUUUGCCA | 479 | 973 | 990 | 47.43% | 20.58% |
| 480 | GGCAAAAGGAUAUAAGGUA | UACCUUAUAUCCUUUUGCC | 481 | 974 | 991 | 25.90% | 4.29% |
| 502 | GUUGUGAAGCAAACUGAAA | UUUCAGUUUGCUUCACAAC | 503 | 996 | 1013 | 28.49% | 2.40% |
| 512 | CUGAAACUGCAGCAUUAAA | UUUAAUGCUGCAGUUUCAG | 513 | 1009 | 1026 | 40.65% | 4.27% |
| 552 | ACAGAAGUUCACUCUUUUA | UAAAAGAGUGAACUUCUGU | 553 | 1042 | 1059 | 32.99% | 2.47% |
| 558 | UCUUUUCCCGGAAAUUGAA | UUCAAUUUCCGGGAAAAGA | 559 | 1054 | 1071 | 29.47% | 2.18% |
| 560 | CUUUUCCCGGAAAUUGACA | UGUCAAUUUCCGGGAAAAG | 561 | 1055 | 1072 | 41.39% | 2.43% |
| 582 | CCUUUAUACAAAAUCUACA | UGUAGAUUUUGUAUAAAGG | 583 | 1076 | 1093 | 74.65% | 11.91% |
| 616 | UGUGAAUCCCCUAAUCAAA | UUUGAUUAGGGGAUUCACA | 617 | 1109 | 1126 | 43.41% | 3.79% |
| 618 | GUGAAUCCCCUAAUCAAGA | UCUUGAUUAGGGGAUUCAC | 619 | 1110 | 1127 | 36.19% | 3.08% |
| 634 | UGGAUGAUGCUGUAAAUGA | UCAUUUACAGCAUCAUCCA | 635 | 1129 | 1146 | 61.80% | 10.95% |
| 636 | GAUGAUGCUGUAAAUGUUA | UAACAUUUACAGCAUCAUC | 637 | 1131 | 1148 | 23.42% | 1.99% |
| 642 | UAAAUGUUGAUGAGAUAAA | UUUAUCUCAUCAACAUUUA | 643 | 1141 | 1158 | 46.72% | 7.85% |
| 646 | UGUUGAUGAGAUAAUGACA | UGUCAUUAUCUCAUCAACA | 647 | 1145 | 1162 | 29.37% | 1.10% |
| 648 | GUUGAUGAGAUAAUGACUA | UAGUCAUUAUCUCAUCAAC | 649 | 1146 | 1163 | 16.93% | 2.14% |
| 656 | AGAUAAUGACUGAUACUUA | UAAGUAUCAGUCAUUAUCU | 657 | 1153 | 1170 | 22.55% | 2.42% |
| 660 | AUAAUGACUGAUACUUCUA | UAGAAGUAUCAGUCAUUAU | 661 | 1155 | 1172 | 45.26% | 4.42% |
| 690 | AUCUCUGAAAAUAAGGAAA | UUUCCUUAUUUUCAGAGAU | 691 | 1191 | 1208 | 27.95% | 1.45% |
| 692 | GAAAAUAAGGAAAAUGUUA | UAACAUUUUCCUUAUUUUC | 693 | 1197 | 1214 | 32.77% | 4.88% |
| 718 | GAGGUUGUGUUUGAUAGUA | UACUAUCAAACACAACCUC | 719 | 1275 | 1292 | 25.27% | 1.85% |
| 720 | AGGUUGUGUUUGAUAGUUA | UAACUAUCAAACACAACCU | 721 | 1276 | 1293 | 30.55% | 1.57% |
| 722 | GGUUGUGUUUGAUAGUUUA | UAAACUAUCAAACACAACC | 723 | 1277 | 1294 | 29.47% | 1.48% |
| 796 | GUGCAGGAUGACAGAAUUA | UAAUUCUGUCAUCCUGCAC | 797 | 1422 | 1439 | 33.29% | 3.25% |
| 820 | GAAAGGAUGGAUAACAUUA | UAAUGUUAUCCAUCCUUUC | 821 | 1446 | 1463 | 28.18% | 2.33% |
| 822 | AAAGGAUGGAUAACAUUUA | UAAAUGUUAUCCAUCCUUU | 823 | 1447 | 1464 | 34.97% | 4.72% |
| 826 | GGAUAACAUUUAUUUUGAA | UUCAAAAUAAAUGUUAUCC | 827 | 1454 | 1471 | 29.04% | 3.27% |
| 848 | CAGUUACAGAGUUUUAUGA | UCAUAAAACUCUGUAACUG | 849 | 1492 | 1509 | 46.08% | 2.51% |
| 852 | UUACAGAGUUUUAUGCAAA | UUUGCAUAAAACUCUGUAA | 853 | 1495 | 1512 | 35.97% | 5.19% |
| 854 | UACAGAGUUUUAUGCAAAA | UUUUGCAUAAAACUCUGUA | 855 | 1496 | 1513 | 30.67% | 1.55% |
| 900 | UUAUUUCUGGCAUUGUUAA | UUAACAAUGCCAGAAAUAA | 901 | 1543 | 1560 | 41.90% | 0.76% |
| 914 | UAGAGAAGCCUGUGAUUUA | UAAAUCACAGGCUUCUCUA | 915 | 1564 | 1581 | 32.55% | 3.19% |
| 928 | CUUUGGCUGCCAUCAUAAA | UUUAUGAUGGCAGCCAAAG | 929 | 1585 | 1602 | 37.53% | 0.23% |
| 930 | UUUGGCUGCCAUCAUAAAA | UUUUAUGAUGGCAGCCAAA | 931 | 1586 | 1603 | 62.24% | 6.30% |
| 934 | GGCUGCCAUCAUAAAAUAA | UUAUUUUAUGAUGGCAGCC | 935 | 1589 | 1606 | 75.79% | 3.96% |
| 936 | GCUGCCAUCAUAAAAUACA | UGUAUUUUAUGAUGGCAGC | 937 | 1590 | 1607 | 39.73% | 1.77% |
| 946 | UACCUCAAAGAAUUCAACA | UGUUGAAUUCUUUGAGGUA | 947 | 1605 | 1622 | 39.67% | 5.42% |
| 948 | CCUCAAAGAAUUCAACUUA | UAAGUUGAAUUCUUUGAGG | 949 | 1607 | 1624 | 38.11% | 2.55% |
| 966 | UCUCCAAACCUGAGAAUUA | UAAUUCUCAGGUUUGGAGA | 967 | 1636 | 1653 | 29.07% | 4.75% |
| 970 | AACCUGAGAAUUUUAAACA | UGUUUAAAAUUCUCAGGUU | 971 | 1642 | 1659 | 63.55% | 10.21% |
| 972 | CCUGAGAAUUUUAAACAGA | UCUGUUUAAAAUUCUCAGG | 973 | 1644 | 1661 | 36.98% | 1.63% |
| 988 | GCUAUCAAGUAAAAUGGAA | UUCCAUUUUACUUGAUAGC | 989 | 1661 | 1678 | 35.63% | 2.07% |
| 990 | CUAUCAAGUAAAAUGGAAA | UUUCCAUUUUACUUGAUAG | 991 | 1662 | 1679 | 35.08% | 2.46% |
| 992 | UAUCAAGUAAAAUGGAAUA | UAUUCCAUUUUACUUGAUA | 993 | 1663 | 1680 | 39.55% | 2.94% |
| 994 | UCAAGUAAAAUGGAAUUUA | UAAAUUCCAUUUUACUUGA | 995 | 1665 | 1682 | 41.67% | 0.76% |
| 996 | CAAGUAAAAUGGAAUUUAA | UUAAAUUCCAUUUUACUUG | 997 | 1666 | 1683 | 46.47% | 5.33% |
| 1006 | UUAUGACAAUUAAUGGAAA | UUUCCAUUAAUUGUCAUAA | 1007 | 1681 | 1698 | 33.49% | 0.60% |
| 1020 | GGAACAACAUUAAGGAAUA | UAUUCCUUAAUGUUGUUCC | 1021 | 1695 | 1712 | 38.00% | 1.90% |
| 1032 | CUGGAAAUCCUACAGAAUA | UAUUCUGUAGGAUUUCCAG | 1032 | 1713 | 1730 | 40.41% | 2.43% |
| 1054 | UCAGACUGAUAUGAAAACA | UGUUUUCAUAUCAGUCUGA | 1055 | 1730 | 1747 | 68.98% | 8.10% |
| 1056 | GACUGAUAUGAAAACCAAA | UUUGGUUUUCAUAUCAGUC | 1057 | 1733 | 1750 | 39.79% | 1.76% |
| 1058 | ACUGAUAUGAAAACCAAAA | UUUUGGUUUUCAUAUCAGU | 1059 | 1734 | 1751 | 38.68% | 2.75% |
| 1076 | UUGCUGUGGGUUUUAGACA | UGUCUAAAACCCACAGCAA | 1077 | 1758 | 1775 | 121.44% | 74.40% |
| 1088 | GUUUUAGACCACACUAAAA | UUUUAGUGUGGUCUAAAAC | 1089 | 1767 | 1784 | 86.75% | 7.70% |
| 1096 | AGACCACACUAAAACUUCA | UGAAGUUUUAGUGUGGUCU | 1097 | 1772 | 1789 | 52.58% | 5.39% |
| 1098 | CCACACUAAAACUUCAUUA | UAAUGAAGUUUUAGUGUGG | 1099 | 1775 | 1792 | 76.51% | 11.60% |
| 1110 | GGGAGACGGAAGUUAAAGA | UCUUUAACUUCCGUCUCCC | 1111 | 1794 | 1811 | 37.03% | 3.68% |
| 1112 | GGAGACGGAAGUUAAAGAA | UUCUUUAACUUCCGUCUCC | 1113 | 1795 | 1812 | 40.15% | 4.44% |
| 1126 | CCCAGCCACUCCUUAAAUA | UAUUUAAGGAGUGGCUGGG | 1127 | 1822 | 1839 | 58.33% | 3.02% |
| 1214 | UUUGGUCAGAUAGAAAAUA | UAUUUUCUAUCUGACCAAA | 1215 | 1902 | 1919 | 45.68% | 5.83% |
| 1220 | CAGAUAGAAAAUCAUCUAA | UUAGAUGAUUUUCUAUCUG | 1221 | 1908 | 1925 | 56.12% | 2.65% |
| 1230 | AAUCAUCUACGUAAAUUGA | UCAAUUUACGUAGAUGAUU | 1230 | 1917 | 1934 | 71.94% | 2.14% |
| 1306 | AGAAUUUCAAGCAAUAAUA | UAUUAUUGCUUGAAAUUCU | 1307 | 2030 | 2047 | 36.86% | 0.88% |
| 1308 | AUUUCAAGCAAUAAUACCA | UGGUAUUAUUGCUUGAAAU | 1309 | 2033 | 2050 | 43.83% | 5.54% |
| 1310 | UUUCAAGCAAUAAUACCUA | UAGGUAUUAUUGCUUGAAA | 1311 | 2034 | 2051 | 36.53% | 1.45% |
| 1318 | AUACCUGCUGUUAAUUCCA | UGGAAUUAACAGCAGGUAU | 1319 | 2046 | 2063 | 44.51% | 3.47% |
| 1326 | ACCGUUAUUUUAGAAAUUA | UAAUUUCUAAAAUAACGGU | 1363 | 2088 | 2105 | 40.01% | 3.36% |
| 1386 | UCCAGUGGAGCAUUACUUA | UAAGUAAUGCUCCACUGGA | 1387 | 2120 | 2137 | 37.78% | 4.62% |
| 1394 | GAGCAUUACUUAAAGAUAA | UUAUCUUUAAGUAAUGCUC | 1395 | 2127 | 2144 | 42.33% | 1.87% |
| 1396 | AGCAUUACUUAAAGAUACA | UGUAUCUUUAAGUAAUGCU | 1397 | 2128 | 2145 | 38.19% | 0.66% |
| 1400 | UACUUAAAGAUACUCAAUA | UAUUGAGUAUCUUUAAGUA | 1401 | 2133 | 2150 | 88.29% | 67.87% |
| 1404 | UUAAAGAUACUCAAUGAAA | UUUCAUUGAGUAUCUUUAA | 1405 | 2136 | 2153 | 34.87% | 2.77% |
| 1424 | GUUGGGGAUAAAACUGAAA | UUUCAGUUUUAUCCCCAAC | 1425 | 2166 | 2183 | 37.58% | 1.87% |
| 1426 | UUGGGGAUAAAACUGAAUA | UAUUCAGUUUUAUCCCCAA | 1427 | 2167 | 2184 | 45.94% | 2.86% |
| 1448 | UUCUGACUUCCCUUUAAUA | UAUUAAAGGGAAGUCAGAA | 1449 | 2198 | 2215 | 42.92% | 2.41% |
| 1452 | UGACUUCCCUUUAAUAAAA | UUUUAUUAAAGGGAAGUCA | 1453 | 2201 | 2218 | 34.18% | 1.53% |
| 1454 | AGAGGAAGGAUGAAAUUCA | UGAAUUUCAUCCUUCCUCU | 1455 | 2221 | 2238 | 38.71% | 4.13% |
| 1506 | AUCCUUCUGCACAAUAUGA | UCAUAUUGUGCAGAAGGAU | 1507 | 2296 | 2313 | 78.53% | 13.44% |
| 1524 | CAGGACAGGAGUUUAUGAA | UUCAUAAACUCCUGUCCUG | 1525 | 2323 | 2340 | 41.36% | 5.28% |
| 1540 | AGAACUCUGCUGUAUCUUA | UAAGAUACAGCAGAGUUCU | 1541 | 2350 | 2367 | 39.12% | 1.41% |
| 1546 | CUCUGCUGUAUCUUGUAUA | UAUACAAGAUACAGCAGAG | 1547 | 2354 | 2371 | 42.74% | 3.97% |
| 1656 | GAAUGGCUUGAUUUUCUAA | UUAGAAAAUCAAGCCAUUC | 1657 | 2496 | 2513 | 43.75% | 3.47% |
| 1666 | UUUCUAGAGAAAUUCAGUA | UACUGAAUUUCUCUAGAAA | 1667 | 2508 | 2525 | 56.85% | 11.91% |
| 1674 | AAAUUCAGUGAACAUUAUA | UAUAAUGUUCACUGAAUUU | 1675 | 2517 | 2534 | 45.05% | 5.48% |
| 1676 | AAUUCAGUGAACAUUAUCA | UGAUAAUGUUCACUGAAUU | 1677 | 2518 | 2535 | 29.77% | 2.22% |
| 1678 | AUUCAGUGAACAUUAUCAA | UUGAUAAUGUUCACUGAAU | 1679 | 2519 | 2536 | 36.74% | 3.41% |
| 1722 | UGUUGACUGCAUUUUCUCA | UGAGAAAAUGCAGUCAACA | 1723 | 2570 | 2587 | 34.29% | 3.73% |
| 1762 | AGACCAACUGUACAAGAAA | UUUCUUGUACAGUUGGUCU | 1763 | 2622 | 2639 | 37.30% | 3.16% |
| 1766 | ACUGUACAAGAAGAAAGAA | UUCUUUCUUCUUGUACAGU | 1767 | 2628 | 2645 | 54.43% | 4.31% |
| 1768 | CUGUACAAGAAGAAAGAAA | UUUCUUUCUUCUUGUACAG | 1769 | 2629 | 2646 | 33.89% | 5.86% |
| 1836 | ACUCAGAGAGAGUAAUGAA | UUCAUUACUCUCUCUGAGU | 1837 | 2740 | 2757 | 29.94% | 3.38% |
| 1838 | UCAGAGAGAGUAAUGAUAA | UUAUCAUUACUCUCUCUGA | 1839 | 2742 | 2759 | 32.69% | 1.16% |
| 1842 | AGAGAGAGUAAUGAUAAUA | UAUUAUCAUUACUCUCUCU | 1843 | 2744 | 2761 | 35.60% | 3.31% |
| 1868 | GAAAGAGCUCCUACAUAAA | UUUAUGUAGGAGCUCUUUC | 1869 | 2782 | 2799 | 36.26% | 1.38% |
| 1886 | AAACAAGUUGCAUUGAUUA | UAAUCAAUGCAACUUGUUU | 1887 | 2799 | 2816 | 48.40% | 12.84% |
| 1888 | AACAAGUUGCAUUGAUUAA | UUAAUCAAUGCAACUUGUU | 1889 | 2800 | 2817 | 63.96% | 2.64% |
| 1964 | GUGGAUGGCAUUUUCACAA | UUGUGAAAAUGCCAUCCAC | 1965 | 2874 | 2891 | 49.72% | 1.59% |
| 1990 | UGCAGACAAUAUAUAUAAA | UUUAUAUAUAUUGUCUGCA | 1991 | 2903 | 2920 | 47.35% | 2.46% |
| 2030 | GACACAGCAGAAAUAAUCA | UGAUUAUUUCUGCUGUGUC | 2031 | 2952 | 2969 | 43.67% | 8.62% |
| 2108 | AUGCUACACUUGAGUAUUA | UAAUACUCAAGUGUAGCAU | 2109 | 3052 | 3069 | 41.76% | 2.04% |
| 2128 | GAGAUGUGAAAUCCUUAAA | UUUAAGGAUUUCACAUCUC | 2129 | 3076 | 3093 | 62.62% | 4.94% |
| 2230 | AACAAGUCCCUGAUUUUGA | UCAAAAUCAGGGACUUGUU | 2231 | 3220 | 3237 | 73.43% | 10.39% |
| 2242 | UUUUGUCACCUUCCUUUAA | UUAAAGGAAGGUGACAAAA | 2243 | 3233 | 3250 | 49.17% | 4.42% |
| 2246 | UCACCUUCCUUUACCAAAA | UUUUGGUAAAGGAAGGUGA | 2247 | 3238 | 3255 | 44.74% | 5.16% |
| 2254 | CUUUACCAAAUAACUAGAA | UUCUAGUUAUUUGGUAAAG | 2255 | 3246 | 3263 | 39.87% | 3.77% |
| 2274 | AAGGAGUUAUGGAUUAAAA | UUUUAAUCCAUAACUCCUU | 2275 | 3275 | 3292 | 41.52% | 1.53% |
| 2294 | UAAAUGUGGCUAAACUAGA | UCUAGUUUAGCCACAUUUA | 2295 | 3289 | 3306 | 39.85% | 2.79% |
| 2330 | GAGCUGGAAGGAUUAAUAA | UUAUUAAUCCUUCCAGCUC | 2331 | 3354 | 3371 | 56.05% | 14.99% |
| 2334 | GGAUUAAUAAAUACGAAAA | UUUUCGUAUUUAUUAAUCC | 2335 | 3363 | 3380 | 52.40% | 5.26% |
| 2356 | ACUCAAGUAUUUUGCAAAA | UUUUGCAAAAUACUUGAGU | 2357 | 3389 | 3406 | 35.71% | 2.25% |
| 2360 | AAGUAUUUUGCAAAGUUAA | UUAACUUUGCAAAAUACUU | 2361 | 3393 | 3410 | 41.68% | 2.43% |
| 2362 | GUAUUUUGCAAAGUUAUGA | UCAUAACUUUGCAAAAUAC | 2363 | 3395 | 3412 | 45.57% | 7.28% |
| 2448 | CAACUGUACAAAAUAACUA | UAGUUAUUUUGUACAGUUG | 2449 | 3540 | 3557 | 59.64% | 10.75% |
| 2502 | ACAUGUGAGCAUAAAAUUA | UAAUUUUAUGCUCACAUGU | 2503 | 3584 | 3601 | 40.95% | 4.16% |
| 2504 | CAUGUGAGCAUAAAAUUAA | UUAAUUUUAUGCUCACAUG | 2505 | 3585 | 3602 | 56.03% | 3.39% |
| 2516 | AAUUAUGACCAUGGUAUAA | UUAUACCAUGGUCAUAAUU | 2517 | 3598 | 3615 | 53.24% | 2.72% |
| 2518 | AUUAUGACCAUGGUAUAUA | UAUAUACCAUGGUCAUAAU | 2519 | 3599 | 3616 | 67.48% | 5.75% |
| 2578 | AUAAACACUCUUGAAUAGA | UCUAUUCAAGAGUGUUUAU | 2579 | 3689 | 3706 | 55.57% | 9.42% |
| 2580 | UAAACACUCUUGAAUAGAA | UUCUAUUCAAGAGUGUUUA | 2581 | 3690 | 3707 | 42.79% | 1.54% |
| 2592 | AUAGACUUCCACUUUGUAA | UUACAAAGUGGAAGUCUAU | 2593 | 3703 | 3720 | 65.27% | 6.23% |
| 2596 | AGACUUCCACUUUGUAAUA | UAUUACAAAGUGGAAGUCU | 2597 | 3705 | 3722 | 58.85% | 9.89% |
| 2602 | CUUCCACUUUGUAAUUAGA | UCUAAUUACAAAGUGGAAG | 2603 | 3708 | 3725 | 51.93% | 7.38% |
| 2654 | CUUAAGUGGCAGAAUAUAA | UUAUAUUCUGCCACUUAAG | 2655 | 3757 | 3774 | 61.67% | 11.09% |
| 2656 | UUAAGUGGCAGAAUAUAAA | UUUAUAUUCUGCCACUUAA | 2657 | 3758 | 3775 | 48.43% | 7.02% |
| 2686 | UUUUGGAGGGUGAUAUAAA | UUUAUAUCACCCUCCAAAA | 2687 | 3785 | 3802 | 48.16% | 6.02% |
| 2762 | UCCACCAAGAACAUAAGAA | UUCUUAUGUUCUUGGUGGA | 2763 | 3912 | 3929 | 49.77% | 1.05% |
| 2768 | ACCAAGAACAUAAGAAUUA | UAAUUCUUAUGUUCUUGGU | 2769 | 3915 | 3932 | 44.17% | 3.47% |
| 2782 | UAGAAUUAUCAAGCUUUUA | UAAAAGCUUGAUAAUUCUA | 2783 | 4290 | 4307 | 53.00% | 2.15% |
| 2844 | UUGGAUGAAAUUAUUUGUA | UACAAAUAAUUUCAUCCAA | 2845 | 4389 | 4406 | 71.32% | 9.32% |
| 2846 | GAUGAAAUUAUUUGUCAUA | UAUGACAAAUAAUUUCAUC | 2847 | 4392 | 4409 | 55.83% | 6.18% |

[0396] For the chemical modifications, “2m” means 2′-O-Methyl ribonucleotides, “r” means ribonucleotide, “p” means phosphate linkage, and “d” means deoxyribonucleotide.

TABLE 13
Chemical Modifications for Sense Strands

| SEQ | | |
|---|---|---|
| ID | | |
| No./ | | |
| Sense | | |
| No. | Sense | Sense Chemical Modifications |
| 78 | ACUCUGAGCCAAAGAAAUA | [rAp\|2mCp\|2mUp\|2mCp\|2mUp\|rGp\|rAp\|rGp\|2mCp |
| | | \|2mCp\|rAp\|rAp\|rAp\|rGp\|rAp |
| | | \|rAp\|rAp\|2mUp\|rAp\|dTp\|dT] |
| 82 | UGAGCCAAAGAAAUGUCUA | [2mUp\|rGp\|rAp\|rGp\|2mCp\|2mCp\|rAp\|rAp\|rAp\|r |
| | | Gp\|rAp\|rAp\|rAp\|2mUp\|rGp\|2m |
| | | Up\|2mCp\|2mUp\|rAp\|dTp\|dT] |
| 104 | CUGCCCUUCCUCAAAGUAA | [2mCp\|2mUp\|rGp\|2mCp\|2mCp\|2mCp\|2mUp\|2mUp\|2 |
| | | mCp\|2mCp\|2mUp\|2mCp\| |
| | | rAp\|rAp\|rAp\|rGp\|2mUp\|rAp\|rAp\|dTp\|dT] |
| 148 | AGUUCUGCCAAAAUGUACA | [rAp\|rGp\|2mUp\|2mUp\|2mCp\|2mUp\|rGp\|2mCp\|2mC |
| | | p\|rAp\|r |
| | | Ap\|rAp\|rAp\|2mUp\|rGp\|2mUp\|rAp\|2mCp\|rAp\|dT |
| | | p\|dT] |
| 158 | GUACUGAUUUUGAUGAUAA | [rGp\|2mUp\|rAp\|2mCp\|2mUp\|rGp\|rAp\|2mUp\|2mUp |
| | | \|2mUp\|2mUp\|rGp\|rAp\|2mU |
| | | p\|rGp\|rAp\|2mUp\|rAp\|rAp\|dTp\|dT] |
| 160 | ACUGAUUUUGAUGAUAUCA | [rAp\|2mCp\|2mUp\|rGp\|rAp\|2mUp\|2mUp\|2mUp\|2mU |
| | | p\|rGp\|rAp\|2mUp\|rGp\|rAp\|2 |
| | | mUp\|rAp\|2mUp\|2mCp\|rAp\|dTp\|dT] |
| 190 | AAGAAUGCAGUUUCUUCUA | [rAp\|rAp\|rGp\|rAp\|rAp\|2mUp\|rGp\|2mCp\|rAp\|rG |
| | | p\|2mUp\|2mUp\|2mUp\|2mCp\|2m |
| | | Up\|2mUp\|2mCp\|2mUp\|rAp\|dTp\|dT] |
| 240 | CAGUUUGGAUCAUCAAAUA | [2mCp\|rAp\|rGp\|2mUp\|2mUp\|2mUp\|rGp\|rGp\|rAp\| |
| | | 2mUp\|2mCp\|rAp\|2mUp\|2mC |
| | | p\|rAp\|rAp\|rAp\|2mUp\|rAp\|dTp\|dT] |
| 244 | GUUUGGAUCAUCAAAUACA | [rGp\|2mUp\|2mUp\|2mUp\|rGp\|rGp\|rAp\|2mUp\|2mCp |
| | | \|rAp\|2mUp\|2mCp\|rAp\|rAp\|r |
| | | Ap\|2mUp\|rAp\|2mCp\|rAp\|dTp\|dT] |
| 246 | UUUGGAUCAUCAAAUACAA | [2mUp\|2mUp\|2mUp\|rGp\|rGp\|rAp\|2mUp\|2mCp\|rAp |
| | | \|2mUp\|2mCp\|rAp\|rAp\|rAp\|2 |
| | | mUp\|rAp\|2mCp\|rAp\|rAp\|dTp\|dT] |
| 250 | UGGAUCAUCAAAUACAAGA | [2mUp\|rGp\|rGp\|rAp\|2mUp\|2mCp\|rAp\|2mUp\|2mCp |
| | | \|rAp\|rAp\|rAp\|2mUp\|rAp\|2m |
| | | Cp\|rAp\|rAp\|rGp\|rAp\|dTp\|dT] |
| 252 | GGAUCAUCAAAUACAAGUA | [rGp\|rGp\|rAp\|2mUp\|2mCp\|rAp\|2mUp\|2mCp\|rAp\| |
| | | rAp\|rAp\|2mUp\|rAp\|2mCp\|rAp\| |
| | | rAp\|rGp\|2mUp\|rAp\|dTp\|dT] |
| 260 | UACAAGUCAUGAAAAUUUA | [2mUp\|rAp\|2mCp\|rAp\|rAp\|rGp\|2mUp\|2mCp\|rAp\| |
| | | 2mUp\|rGp\|rAp\|rAp\|rAp\|rAp\|2 |
| | | mUp\|2mUp\|2mUp\|rAp\|dTp\|dT] |
| 308 | CCGCUAGAAUUACAAUACA | [2mCp\|2mCp\|rGp\|2mCp\|2mUp\|rAp\|rGp\|rAp\|rAp\| |
| | | 2mUp\|2mUp\|rAp\|2mCp\|rAp\|r |
| | | Ap\|2mUp\|rAp\|2mCp\|rAp\|dTp\|dT] |
| 314 | AGAAUUACAAUACAUAGAA | [rAp\|rGp\|rAp\|rAp\|2mUp\|2mUp\|rAp\|2mCp\|rAp\|r |
| | | Ap\|2mUp\|rAp\|2mCp\|rAp\|2mUp\| |
| | | rAp\|rGp\|rAp\|rAp\|dTp\|dT] |
| 316 | GAAUUACAAUACAUAGAAA | [rGp\|rAp\|rAp\|2mUp\|2mUp\|rAp\|2mCp\|rAp\|rAp\|2 |
| | | mUp\|rAp\|2mCp\|rAp\|2mUp\|rAp\| |
| | | rGp\|rAp\|rAp\|rAp\|dTp\|dT] |
| 354 | GUGUGGAAUGUGGAUAUAA | [rGp\|2mUp\|rGp\|2mUp\|rGp\|rGp\|rAp\|rAp\|2mUp\|r |
| | | Gp\|2mUp\|rGp\|rGp\|rAp\|2mUp\|r |
| | | Ap\|2mUp\|rAp\|rAp\|dTp\|dT] |
| 356 | UGUGGAAUGUGGAUAUAAA | [2mUp\|rGp\|2mUp\|rGp\|rGp\|rAp\|rAp\|2mUp\|rGp\|2 |
| | | mUp\|rGp\|rGp\|rAp\|2mUp\|rAp\|2 |
| | | mUp\|rAp\|rAp\|rAp\|dTp\|dT] |
| 360 | UGGAAUGUGGAUAUAAGUA | [2mUp\|rGp\|rGp\|rAp\|rAp\|2mUp\|rGp\|2mUp\|rGp\|r |
| | | Gp\|rAp\|2mUp\|rAp\|2mUp\|rAp\|r |
| | | Ap\|rGp\|2mUp\|rAp\|dTp\|dT] |
| 362 | GGAAUGUGGAUAUAAGUAA | [rGp\|rGp\|rAp\|rAp\|2mUp\|rGp\|2mUp\|rGp\|rGp\|rA |
| | | p\|2mUp\|rAp\|2mUp\|rAp\|rAp\|rGp\| |
| | | 2mUp\|rAp\|rAp\|dTp\|dT] |
| 364 | GAAUGUGGAUAUAAGUAUA | [rGp\|rAp\|rAp\|2mUp\|rGp\|2mUp\|rGp\|rGp\|rAp\|2m |
| | | Up\|rAp\|2mUp\|rAp\|rAp\|rGp\|2m |
| | | Up\|rAp\|2mUp\|rAp\|dTp\|dT] |
| 368 | AUGUGGAUAUAAGUAUAGA | [rAp\|2mUp\|rGp\|2mUp\|rGp\|rGp\|rAp\|2mUp\|rAp\|2 |
| | | mUp\|rAp\|rAp\|rGp\|2mUp\|rAp\|2 |
| | | mUp\|rAp\|rGp\|rAp\|dTp\|dT] |
| 370 | UGUGGAUAUAAGUAUAGAA | [2mUp\|rGp\|2mUp\|rGp\|rGp\|rAp\|2mUp\|rAp\|2mUp\| |
| | | rAp\|rAp\|rGp\|2mUp\|rAp\|2mUp |
| | | \|rAp\|rGp\|rAp\|rAp\|dTp\|dT] |
| 372 | UGGAUAUAAGUAUAGAUUA | [2mUp\|rGp\|rGp\|rAp\|2mUp\|rAp\|2mUp\|rAp\|rAp\|r |
| | | Gp\|2mUp\|rAp\|2mUp\|rAp\|rGp\|r |
| | | Ap\|2mUp\|2mUp\|rAp\|dTp\|dT] |
| 396 | GAGCUCAAUAUUUAUUGCA | [rGp\|rAp\|rGp\|2mCp\|2mUp\|2mCp\|rAp\|rAp\|2mUp\| |
| | | rAp\|2mUp\|2mUp\|2mUp\|rAp\|2 |
| | | mUp\|2mUp\|rGp\|2mCp\|rAp\|dTp\|dT] |
| 414 | UUUAGAUCACAACUUUAUA | [2mUp\|2mUp\|2mUp\|rAp\|rGp\|rAp\|2mUp\|2mCp\|rAp |
| | | \|2mCp\|rAp\|rAp\|2mCp\|2mUp |
| | | 2mUp\|2mUp\|rAp\|2mUp\|rAp\|dTp\|dT] |
| 416 | UUAGAUCACAACUUUAUGA | [2mUp\|2mUp\|rAp\|rGp\|rAp\|2mUp\|2mCp\|rAp\|2mCp |
| | | \|rAp\|rAp\|2mCp\|2mUp\|2mUp |
| | | \|2mUp\|rAp\|2mUp\|rGp\|rAp\|dTp\|dT] |
| 418 | UAGAUCACAACUUUAUGAA | [2mUp\|rAp\|rGp\|rAp\|2mUp\|2mCp\|rAp\|2mCp\|rAp\| |
| | | rAp\|2mCp\|2mUp\|2mUp\|2mUp |
| | | rAp\|2mUp\|rGp\|rAp\|rAp\|dTp\|dT] |
| 474 | GGUGGCAAAAGGAUAUAAA | [rGp\|rGp\|2mUp\|rGp\|rGp\|2mCp\|rAp\|rAp\|rAp\|rA |
| | | p\|rGp\|rGp\|rAp\|2mUp\|rAp\|2mUp\| |
| | | rAp\|rAp\|rAp\|dTp\|dT] |
| 476 | GUGGCAAAAGGAUAUAAGA | [rGp\|2mUp\|rGp\|rGp\|2mCp\|rAp\|rAp\|rAp\|rAp\|rG |
| | | p\|rGp\|rAp\|2mUp\|rAp\|2mUp\|rAp\| |
| | | rAp\|rGp\|rAp\|dTp\|dT] |
| 478 | UGGCAAAAGGAUAUAAGGA | [2mUp\|rGp\|rGp\|2mCp\|rAp\|rAp\|rAp\|rAp\|rGp\|rG |
| | | p\|rAp\|2mUp\|rAp\|2mUp\|rAp\|rAp\| |
| | | rGp\|rGp\|rAp\|dTp\|dT] |
| 480 | GGCAAAAGGAUAUAAGGUA | [rGp\|rGp\|2mCp\|rAp\|rAp\|rAp\|rAp\|rGp\|rGp\|rAp |
| | | \|2mUp\|rAp\|2mUp\|rAp\|rAp\|rGp\|rG |
| | | p\|2mUp\|rAp\|dTp\|dT] |
| 502 | GUUGUGAAGCAAACUGAAA | [rGp\|2mUp\|2mUp\|rGp\|2mUp\|rGp\|rAp\|rAp\|rGp\| |
| | | 2mCp\|rAp\|rAp\|rAp\|2mCp\|2mUp |
| | | \|rGp\|rAp\|rAp\|rAp\|dTp\|dT] |
| 512 | CUGAAACUGCAGCAUUAAA | [2mCp\|2mUp\|rGp\|rAp\|rAp\|rAp\|2mCp\|2mUp\|rGp\| |
| | | 2mCp\|rAp\|rGp\|2mCp\|rAp\|2m |
| | | Up\|2mUp\|rAp\|rAp\|rAp\|dTp\|dT] |
| 552 | ACAGAAGUUCACUCUUUUA | [rAp\|2mCp\|rAp\|rGp\|rAp\|rAp\|rGp\|2mUp\|2mUp\|2 |
| | | mCp\|rAp\|2mCp\|2mUp\|2mCp\|2 |
| | | mUp\|2mUp\|2mUp\|2mUp\|rAp\|dTp\|dT] |
| 558 | UCUUUUCCCGGAAAUUGAA | [2mUp\|2mCp\|2mUp\|2mUp\|2mUp\|2mUp\|2mCp\|2mCp\| |
| | | 2mCp\|rGp\|rGp\|rAp\|rAp\|r |
| | | Ap\|2mUp\|2mUp\|rGp\|rAp\|rAp\|dTp\|dT] |
| 560 | CUUUUCCCGGAAAUUGACA | [2mCp\|2mUp\|2mUp\|2mUp\|2mUp\|2mCp\|2mCp\|2mCp\| |
| | | rGp\|rGp\|rAp\|rAp\|rAp\|2m |
| | | Up\|2mUp\|rGp\|rAp\|2mCp\|rAp\|dTp\|dT] |
| 582 | CCUUUAUACAAAAUCUACA | [2mCp\|2mCp\|2mUp\|2mUp\|2mUp\|rAp\|2mUp\|rAp\|2m |
| | | Cp\|rAp\|rAp\|rAp\|rAp\|2mUp |
| | | 2mCp\|2mUp\|rAp\|2mCp\|rAp\|dTp\|dT] |
| 616 | UGUGAAUCCCCUAAUCAAA | [2mUp\|rGp\|2mUp\|rGp\|rAp\|rAp\|2mUp\|2mCp\|2mCp |
| | | \|2mCp\|2mCp\|2mUp\|rAp\|rA |
| | | p\|2mUp\|2mCp\|rAp\|rAp\|rAp\|dTp\|dT] |
| 618 | GUGAAUCCCCUAAUCAAGA | [rGp\|2mUp\|rGp\|rAp\|rAp\|2mUp\|2mCp\|2mCp\|2mCp |
| | | \|2mCp\|2mUp\|rAp\|rAp\|2mU |
| | | p\|2mCp\|rAp\|rAp\|rGp\|rAp\|dTp\|dT] |
| 634 | UGGAUGAUGCUGUAAAUGA | [2mUp\|rGp\|rGp\|rAp\|2mUp\|rGp\|rAp\|2mUp\|rGp\|2 |
| | | mCp\|2mUp\|rGp\|2mUp\|rAp\|rAp |
| | | rAp\|2mUp\|rGp\|rAp\|dTp\|dT] |
| 636 | GAUGAUGCUGUAAAUGUUA | [rGp\|rAp\|2mUp\|rGp\|rAp\|2mUp\|rGp\|2mCp\|2mUp\| |
| | | rGp\|2mUp\|rAp\|rAp\|rAp\|2mUp |
| | | \|rGp\|2mUp\|2mUp\|rAp\|dTp\|dT] |
| 642 | UAAAUGUUGAUGAGAUAAA | [2mUp\|rAp\|rAp\|rAp\|2mUp\|rGp\|2mUp\|2mUp\|rGp\| |
| | | rAp\|2mUp\|rGp\|rAp\|rGp\|rAp\|2 |
| | | mUp\|rAp\|rAp\|rAp\|dTp\|dT] |
| 646 | UGUUGAUGAGAUAAUGACA | [2mUp\|rGp\|2mUp\|2mUp\|rGp\|rAp\|2mUp\|rGp\|rAp\| |
| | | rGp\|rAp\|2mUp\|rAp\|rAp\|2mUp |
| | | \|rGp\|rAp\|2mCp\|rAp\|dTp\|dT] |
| 648 | GUUGAUGAGAUAAUGACUA | [rGp\|2mUp\|2mUp\|rGp\|rAp\|2mUp\|rGp\|rAp\|rGp\|r |
| | | Ap\|2mUp\|rAp\|rAp\|2mUp\|rGp\|r |
| | | Ap\|2mCp\|2mUp\|rAp\|dTp\|dT] |
| 656 | AGAUAAUGACUGAUACUUA | [rAp\|rGp\|rAp\|2mUp\|rAp\|rAp\|2mUp\|rGp\|rAp\|2m |
| | | Cp\|2mUp\|rGp\|rAp\|2mUp\|rAp\|2 |
| | | mCp\|2mUp\|2mUp\|rAp\|dTp\|dT] |
| 660 | AUAAUGACUGAUACUUCUA | [rAp\|2mUp\|rAp\|rAp\|2mUp\|rGp\|rAp\|2mCp\|2mUp\| |
| | | rGp\|rAp\|2mUp\|rAp\|2mCp\|2m |
| | | Up\|2mUp\|2mCp\|2mUp\|rAp\|dTp\|dT] |
| 690 | AUCUCUGAAAAUAAGGAAA | [rAp\|2mUp\|2mCp\|2mUp\|2mCp\|2mUp\|rGp\|rAp\|rAp |
| | | \|rAp\|rAp\|2mUp\|rAp\|rAp\|rGp\| |
| | | rGp\|rAp\|rAp\|rAp\|dTp\|dT] |
| 692 | GAAAAUAAGGAAAAUGUUA | [rGp\|rAp\|rAp\|rAp\|rAp\|2mUp\|rAp\|rAp\|rGp\|rGp |
| | | \|rAp\|rAp\|rAp\|rAp\|2mUp\|rGp\|2mU |
| | | p\|2mUp\|rAp\|dTp\|dT] |
| 718 | GAGGUUGUGUUUGAUAGUA | [rGp\|rAp\|rGp\|rGp\|2mUp\|2mUp\|rGp\|2mUp\|rGp\|2 |
| | | mUp\|2mUp\|2mUp\|rGp\|rAp\|2m |
| | | Up\|rAp\|rGp\|2mUp\|rAp\|dTp\|dT] |
| 720 | AGGUUGUGUUUGAUAGUUA | [rAp\|rGp\|rGp\|2mUp\|2mUp\|rGp\|2mUp\|rGp\|2mUp\| |
| | | 2mUp\|2mUp\|rGp\|rAp\|2mUp\|r |
| | | Ap\|rGp\|2mUp\|2mUp\|rAp\|dTp\|dT] |
| 722 | GGUUGUGUUUGAUAGUUUA | [rGp\|rGp\|2mUp\|2mUp\|rGp\|2mUp\|rGp\|2mUp\|2mUp |
| | | \|2mUp\|rGp\|rAp\|2mUp\|rAp\|r |
| | | Gp\|2mUp\|2mUp\|2mUp\|rAp\|dTp\|dT] |
| 796 | GUGCAGGAUGACAGAAUUA | [rGp\|2mUp\|rGp\|2mCp\|rAp\|rGp\|rGp\|rAp\|2mUp\|r |
| | | Gp\|rAp\|2mCp\|rAp\|rGp\|rAp\|rAp\| |
| | | 2mUp\|2mUp\|rAp\|dTp\|dT] |
| 820 | GAAAGGAUGGAUAACAUUA | [rGp\|rAp\|rAp\|rAp\|rGp\|rGp\|rAp\|2mUp\|rGp\|rGp |
| | | \|rAp\|2mUp\|rAp\|rAp\|2mCp\|rAp\|2 |
| | | mUp\|2mUp\|rAp\|dTp\|dT] |
| 822 | AAAGGAUGGAUAACAUUUA | [rAp\|rAp\|rAp\|rGp\|rGp\|rAp\|2mUp\|rGp\|rGp\|rAp |
| | | \|2mUp\|rAp\|rAp\|2mCp\|rAp\|2mUp\| |
| | | 2mUp\|2mUp\|rAp\|dTp\|dT] |
| 826 | GGAUAACAUUUAUUUUGAA | [rGp\|rGp\|rAp\|2mUp\|rAp\|rAp\|2mCp\|rAp\|2mUp\|2 |
| | | mUp\|2mUp\|rAp\|2mUp\|2mUp\|2 |
| | | mUp\|2mUp\|rGp\|rAp\|rAp\|dTp\|dT] |
| 848 | CAGUUACAGAGUUUUAUGA | [2mCp\|rAp\|rGp\|2mUp\|2mUp\|rAp\|2mCp\|rAp\|rGp\| |
| | | rAp\|rGp\|2mUp\|2mUp\|2mUp\|2 |
| | | mUp\|rAp\|2mUp\|rGp\|rAp\|dTp\|dT] |
| 852 | UUACAGAGUUUUAUGCAAA | [2mUp\|2mUp\|rAp\|2mCp\|rAp\|rGp\|rAp\|rGp\|2mUp\| |
| | | 2mUp\|2mUp\|2mUp\|rAp\|2mU |
| | | p\|rGp\|2mCp\|rAp\|rAp\|rAp\|dTp\|dT] |
| 854 | UACAGAGUUUUAUGCAAAA | [2mUp\|rAp\|2mCp\|rAp\|rGp\|rAp\|rGp\|2mUp\|2mUp\| |
| | | 2mUp\|2mUp\|rAp\|2mUp\|rGp\|2 |
| | | mCp\|rAp\|rAp\|rAp\|rAp\|dTp\|dT] |
| 900 | UUAUUUCUGGCAUUGUUAA | [2mUp\|2mUp\|rAp\|2mUp\|2mUp\|2mUp\|2mCp\|2mUp\|r |
| | | Gp\|rGp\|2mCp\|rAp\|2mUp\| |
| | | 2mUp\|rGp\|2mUp\|2mUp\|rAp\|rAp\|dTp\|dT] |
| 914 | UAGAGAAGCCUGUGAUUUA | [2mUp\|rAp\|rGp\|rAp\|rGp\|rAp\|rAp\|rGp\|2mCp\|2m |
| | | Cp\|2mUp\|rGp\|2mUp\|rGp\|rAp\|2 |
| | | mUp\|2mUp\|2mUp\|rAp\|dTp\|dT] |
| 928 | CUUUGGCUGCCAUCAUAAA | [2mCp\|2mUp\|2mUp\|2mUp\|rGp\|rGp\|2mCp\|2mUp\|rG |
| | | p\|2mCp\|2mCp\|rAp\|2mUp\| |
| | | 2mCp\|rAp\|2mUp\|rAp\|rAp\|rAp\|dTp\|dT] |
| 930 | UUUGGCUGCCAUCAUAAAA | [2mUp\|2mUp\|2mUp\|rGp\|rGp\|2mCp\|2mUp\|rGp\|2mC |
| | | p\|2mCp\|rAp\|2mUp\|2mCp\| |
| | | rAp\|2mUp\|rAp\|rAp\|rAp\|rAp\|dTp\|dT] |
| 934 | GGCUGCCAUCAUAAAAUAA | [rGp\|rGp\|2mCp\|2mUp\|rGp\|2mCp\|2mCp\|rAp\|2mUp |
| | | \|2mCp\|rAp\|2mUp\|rAp\|rAp\|r |
| | | Ap\|rAp\|2mUp\|rAp\|rAp\|dTp\|dT] |
| 936 | GCUGCCAUCAUAAAAUACA | [rGp\|2mCp\|2mUp\|rGp\|2mCp\|2mCp\|rAp\|2mUp\|2mC |
| | | p\|rAp\|2mUp\|rAp\|rAp\|rAp\|r |
| | | Ap\|2mUp\|rAp\|2mCp\|rAp\|dTp\|dT] |
| 946 | UACCUCAAAGAAUUCAACA | [2mUp\|rAp\|2mCp\|2mCp\|2mUp\|2mCp\|rAp\|rAp\|rAp |
| | | \|rGp\|rAp\|rAp\|2mUp\|2mUp\|2 |
| | | mCp\|rAp\|rAp\|2mCp\|rAp\|dTp\|dT] |
| 948 | CCUCAAAGAAUUCAACUUA | [2mCp\|2mCp\|2mUp\|2mCp\|rAp\|rAp\|rAp\|rGp\|rAp\| |
| | | rAp\|2mUp\|2mUp\|2mCp\|rAp\|r |
| | | Ap\|2mCp\|2mUp\|2mUp\|rAp\|dTp\|dT] |
| 966 | UCUCCAAACCUGAGAAUUA | [2mUp\|2mCp\|2mUp\|2mCp\|2mCp\|rAp\|rAp\|rAp\|2mC |
| | | p\|2mCp\|2mUp\|rGp\|rAp\|rG |
| | | p\|rAp\|rAp\|2mUp\|2mUp\|rAp\|dTp\|dT] |
| 970 | AACCUGAGAAUUUUAAACA | [rAp\|rAp\|2mCp\|2mCp\|2mUp\|rGp\|rAp\|rGp\|rAp\|r |
| | | Ap\|2mUp\|2mUp\|2mUp\|2mUp\|r |
| | | Ap\|rAp\|rAp\|2mCp\|rAp\|dTp\|dT] |
| 972 | CCUGAGAAUUUUAAACAGA | [2mCp\|2mCp\|2mUp\|rGp\|rAp\|rGp\|rAp\|rAp\|2mUp\| |
| | | 2mUp\|2mUp\|2mUp\|rAp\|rAp\|r |
| | | Ap\|2mCp\|rAp\|rGp\|rAp\|dTp\|dT] |
| 988 | GCUAUCAAGUAAAAUGGAA | [rGp\|2mCp\|2mUp\|rAp\|2mUp\|2mCp\|rAp\|rAp\|rGp\| |
| | | 2mUp\|rAp\|rAp\|rAp\|rAp\|2mUp\| |
| | | rGp\|rGp\|rAp\|rAp\|dTp\|dT] |
| 990 | CUAUCAAGUAAAAUGGAAA | [2mCp\|2mUp\|rAp\|2mUp\|2mCp\|rAp\|rAp\|rGp\|2mUp |
| | | \|rAp\|rAp\|rAp\|rAp\|2mUp\|rGp\| |
| | | rGp\|rAp\|rAp\|rAp\|dTp\|dT] |
| 992 | UAUCAAGUAAAAUGGAAUA | [2mUp\|rAp\|2mUp\|2mCp\|rAp\|rAp\|rGp\|2mUp\|rAp\| |
| | | rAp\|rAp\|rAp\|2mUp\|rGp\|rGp\|rA |
| | | p\|rAp\|2mUp\|rAp\|dTp\|dT] |
| 994 | UCAAGUAAAAUGGAAUUUA | [2mUp\|2mCp\|rAp\|rAp\|rGp\|2mUp\|rAp\|rAp\|rAp\|r |
| | | Ap\|2mUp\|rGp\|rGp\|rAp\|rAp\|2mU |
| | | p\|2mUp\|2mUp\|rAp\|dTp\|dT] |
| 996 | CAAGUAAAAUGGAAUUUAA | [2mCp\|rAp\|rAp\|rGp\|2mUp\|rAp\|rAp\|rAp\|rAp\|2m |
| | | Up\|rGp\|rGp\|rAp\|rAp\|2mUp\|2mU |
| | | p\|2mUp\|rAp\|rAp\|dTp\|dT] |
| 1006 | UUAUGACAAUUAAUGGAAA | [2mUp\|2mUp\|rAp\|2mUp\|rGp\|rAp\|2mCp\|rAp\|rAp\| |
| | | 2mUp\|2mUp\|rAp\|rAp\|2mUp\|r |
| | | Gp\|rGp\|rAp\|rAp\|rAp\|dTp\|dT] |
| 1020 | GGAACAACAUUAAGGAAUA | [rGp\|rGp\|rAp\|rAp\|2mCp\|rAp\|rAp\|2mCp\|rAp\|2m |
| | | Up\|2mUp\|rAp\|rAp\|rGp\|rGp\|rAp\| |
| | | rAp\|2mUp\|rAp\|dTp\|dT] |
| 1032 | CUGGAAAUCCUACAGAAUA | [2mCp\|2mUp\|rGp\|rGp\|rAp\|rAp\|rAp\|2mUp\|2mCp\| |
| | | 2mCp\|2mUp\|rAp\|2mCp\|rAp\|r |
| | | Gp\|rAp\|rAp\|2mUp\|rAp\|dTp\|dT] |
| 1054 | UCAGACUGAUAUGAAAACA | [2mUp\|2mCp\|rAp\|rGp\|rAp\|2mCp\|2mUp\|rGp\|rAp\| |
| | | 2mUp\|rAp\|2mUp\|rGp\|rAp\|rAp |
| | | \|rAp\|rAp\|2mCp\|rAp\|dTp\|dT] |
| 1056 | GACUGAUAUGAAAACCAAA | [rGp\|rAp\|2mCp\|2mUp\|rGp\|rAp\|2mUp\|rAp\|2mUp\| |
| | | rGp\|rAp\|rAp\|rAp\|rAp\|2mCp\|2 |
| | | mCp\|rAp\|rAp\|rAp\|dTp\|dT] |
| 1058 | ACUGAUAUGAAAACCAAAA | [rAp\|2mCp\|2mUp\|rGp\|rAp\|2mUp\|rAp\|2mUp\|rGp\| |
| | | rAp\|rAp\|rAp\|rAp\|2mCp\|2mCp\| |
| | | rAp\|rAp\|rAp\|rAp\|dTp\|dT] |
| 1076 | UUGCUGUGGGUUUUAGACA | [2mUp\|2mUp\|rGp\|2mCp\|2mUp\|rGp\|2mUp\|rGp\|rGp |
| | | \|rGp\|2mUp\|2mUp\|2mUp\|2 |
| | | mUp\|rAp\|rGp\|rAp\|2mCp\|rAp\|dTp\|dT] |
| 1088 | GUUUUAGACCACACUAAAA | [rGp\|2mUp\|2mUp\|2mUp\|2mUp\|rAp\|rGp\|rAp\|2mCp |
| | | \|2mCp\|rAp\|2mCp\|rAp\|2mC |
| | | p\|2mUp\|rAp\|rAp\|rAp\|rAp\|dTp\|dT] |
| 1096 | AGACCACACUAAAACUUCA | [rAp\|rGp\|rAp\|2mCp\|2mCp\|rAp\|2mCp\|rAp\|2mCp\| |
| | | 2mUp\|rAp\|rAp\|rAp\|rAp\|2mCp\| |
| | | 2mUp\|2mUp\|2mCp\|rAp\|dTp\|dT] |
| 1098 | CCACACUAAAACUUCAUUA | [2mCp\|2mCp\|rAp\|2mCp\|rAp\|2mCp\|2mUp\|rAp\|rAp |
| | | \|rAp\|rAp\|2mCp\|2mUp\|2mUp |
| | | \|2mCp\|rAp\|2mUp\|2mUp\|rAp\|dTp\|dT] |
| 1110 | GGGAGACGGAAGUUAAAGA | [rGp\|rGp\|rGp\|rAp\|rGp\|rAp\|2mCp\|rGp\|rGp\|rAp |
| | | \|rAp\|rGp\|2mUp\|2mUp\|rAp\|rAp\|rA |
| | | p\|rGp\|rAp\|dTp\|dT] |
| 1112 | GGAGACGGAAGUUAAAGAA | [rGp\|rGp\|rAp\|rGp\|rAp\|2mCp\|rGp\|rGp\|rAp\|rAp |
| | | \|rGp\|2mUp\|2mUp\|rAp\|rAp\|rAp\|rG |
| | | p\|rAp\|rAp\|dTp\|dT] |
| 1126 | CCCAGCCACUCCUUAAAUA | [2mCp\|2mCp\|2mCp\|rAp\|rGp\|2mCp\|2mCp\|rAp\|2mC |
| | | p\|2mUp\|2mCp\|2mCp\|2mU |
| | | p\|2mUp\|rAp\|rAp\|rAp\|2mUp\|rAp\|dTp\|dT] |
| 1214 | UUUGGUCAGAUAGAAAAUA | [2mUp\|2mUp\|2mUp\|rGp\|rGp\|2mUp\|2mCp\|rAp\|rGp |
| | | \|rAp\|2mUp\|rAp\|rGp\|Ap\|Ap |
| | | \|rAp\|rAp\|2mUp\|rAp\|dTp\|dT] |
| 1220 | CAGAUAGAAAAUCAUCUAA | [2mCp\|rAp\|rGp\|rAp\|2mUp\|rAp\|rGp\|rAp\|rAp\|rA |
| | | p\|rAp\|2mUp\|2mCp\|rAp\|2mUp\|2 |
| | | mCp\|2mUp\|rAp\|rAp\|dTp\|dT] |
| 1230 | AAUCAUCUACGUAAAUUGA | [rAp\|rAp\|2mUp\|2mCp\|rAp\|2mUp\|2mCp\|2mUp\|rAp |
| | | \|2mCp\|rGp\|2mUp\|rAp\|rAp\|r |
| | | Ap\|2mUp\|2mUp\|rGp\|rAp\|dTp\|dT] |
| 1306 | AGAAUUUCAAGCAAUAAUA | [rAp\|rGp\|rAp\|rAp\|2mUp\|2mUp\|2mUp\|2mCp\|rAp\| |
| | | rAp\|rGp\|2mCp\|rAp\|rAp\|2mUp\| |
| | | rAp\|rAp\|2mUp\|rAp\|dTp\|dT] |
| 1308 | AUUUCAAGCAAUAAUACCA | [rAp\|2mUp\|2mUp\|2mUp\|2mCp\|rAp\|rAp\|rGp\|2mCp |
| | | \|rAp\|rAp\|2mUp\|rAp\|rAp\|2m |
| | | Up\|rAp\|2mCp\|2mCp\|rAp\|dTp\|dT] |
| 1310 | UUUCAAGCAAUAAUACCUA | [2mUp\|2mUp\|2mUp\|2mCp\|rAp\|rAp\|rGp\|2mCp\|rAp |
| | | \|rAp\|2mUp\|rAp\|rAp\|2mUp\|r |
| | | Ap\|2mCp\|2mCp\|2mUp\|rAp\|dTp\|dT] |
| 1318 | AUACCUGCUGUUAAUUCCA | [rAp\|2mUp\|rAp\|2mCp\|2mCp\|2mUp\|rGp\|2mCp\|2mU |
| | | p\|rGp\|2mUp\|2mUp\|rAp\|rA |
| | | p\|2mUp\|2mUp\|2mCp\|2mCp\|rAp\|dTp\|dT] |
| 1326 | ACCGUUAUUUUAGAAAUUA | [rAp\|2mCp\|2mCp\|rGp\|2mUp\|2mUp\|rAp\|2mUp\|2mU |
| | | p\|2mUp\|2mUp\|rAp\|rGp\|rA |
| | | p\|rAp\|rAp\|2mUp\|2mUp\|rAp\|dTp\|dT] |
| 1386 | UCCAGUGGAGCAUUACUUA | [2mUp\|2mCp\|2mCp\|rAp\|rGp\|2mUp\|rGp\|rGp\|rAp\| |
| | | rGp\|2mCp\|rAp\|2mUp\|2mUp\|r |
| | | Ap\|2mCp\|2mUp\|2mUp\|rAp\|dTp\|dT] |
| 1394 | GAGCAUUACUUAAAGAUAA | [rGp\|rAp\|rGp\|2mCp\|rAp\|2mUp\|2mUp\|rAp\|2mCp\| |
| | | 2mUp\|2mUp\|rAp\|rAp\|rAp\|rGp |
| | | \|rAp\|2mUp\|rAp\|rAp\|dTp\|dT] |
| 1396 | AGCAUUACUUAAAGAUACA | [rAp\|rGp\|2mCp\|rAp\|2mUp\|2mUp\|rAp\|2mCp\|2mUp |
| | | \|2mUp\|rAp\|rAp\|rAp\|rGp\|rAp\| |
| | | 2mUp\|rAp\|2mCp\|rAp\|dTp\|dT] |
| 1400 | UACUUAAAGAUACUCAAUA | [2mUp\|rAp\|2mCp\|2mUp\|2mUp\|rAp\|rAp\|rAp\|rGp\| |
| | | rAp\|2mUp\|rAp\|2mCp\|2mUp\|2 |
| | | mCp\|rAp\|rAp\|2mUp\|rAp\|dTp\|dT] |
| 1404 | UUAAAGAUACUCAAUGAAA | [2mUp\|2mUp\|rAp\|rAp\|rAp\|rGp\|rAp\|2mUp\|rAp\|2 |
| | | mCp\|2mUp\|2mCp\|rAp\|rAp\|2m |
| | | Up\|rGp\|rAp\|rAp\|rAp\|dTp\|dT] |
| 1424 | GUUGGGGAUAAAACUGAAA | [rGp\|2mUp\|2mUp\|rGp\|rGp\|rGp\|rGp\|rAp\|2mUp\|r |
| | | Ap\|rAp\|rAp\|rAp\|2mCp\|2mUp\|r |
| | | Gp\|rAp\|rAp\|rAp\|dTp\|dT] |
| 1426 | UUGGGGAUAAAACUGAAUA | [2mUp\|2mUp\|rGp\|rGp\|rGp\|rGp\|rAp\|2mUp\|rAp\|r |
| | | Ap\|rAp\|rAp\|2mCp\|2mUp\|rGp\|r |
| | | Ap\|rAp\|2mUp\|rAp\|dTp\|dT] |
| 1448 | UUCUGACUUCCCUUUAAUA | [2mUp\|2mUp\|2mCp\|2mUp\|rGp\|rAp\|2mCp\|2mUp\|2m |
| | | Up\|2mCp\|2mCp\|2mCp\|2 |
| | | mUp\|2mUp\|2mUp\|rAp\|rAp\|2mUp\|rAp\|dTp\|dT] |
| 1452 | UGACUUCCCUUUAAUAAAA | [2mUp\|rGp\|rAp\|2mCp\|2mUp\|2mUp\|2mCp\|2mCp\|2m |
| | | Cp\|2mUp\|2mUp\|2mUp\|rA |
| | | 2mUp\|rAp\|2mUp\|rAp\|dTp\|dT] |
| 1454 | AGAGGAAGGAUGAAAUUCA | [rAp\|rGp\|rAp\|rGp\|rGp\|rAp\|rAp\|rGp\|rGp\|rAp\| |
| | | 2mUp\|rGp\|rAp\|rAp\|rAp\|2mUp\|2mU |
| | | p\|2mCp\|rAp\|dTp\|dT] |
| 1506 | AUCCUUCUGCACAAUAUGA | [rAp\|2mUp\|2mCp\|2mCp\|2mUp\|2mUp\|2mCp\|2mUp\|r |
| | | Gp\|2mCp\|rAp\|2mCp\|rAp\|r |
| | | Ap\|2mUp\|rAp\|2mUp\|rGp\|rAp\|dTp\|dT] |
| 1524 | CAGGACAGGAGUUUAUGAA | [2mCp\|rAp\|rGp\|rGp\|rAp\|2mCp\|rAp\|rGp\|rGp\|rA |
| | | p\|rGp\|2mUp\|2mUp\|2mUp\|rAp\|2 |
| | | mUp\|rGp\|rAp\|rAp\|dTp\|dT] |
| 1540 | AGAACUCUGCUGUAUCUUA | [rAp\|rGp\|rAp\|rAp\|2mCp\|2mUp\|2mCp\|2mUp\|rGp\| |
| | | 2mCp\|2mUp\|rGp\|2mUp\|rAp\|2 |
| | | mUp\|2mCp\|2mUp\|2mUp\|rAp\|dTp\|dT] |
| 1546 | CUCUGCUGUAUCUUGUAUA | [2mCp\|2mUp\|2mCp\|2mUp\|rGp\|2mCp\|2mUp\|rGp\|2m |
| | | Up\|rAp\|2mUp\|2mCp\|2mU |
| | | p\|2mUp\|rGp\|2mUp\|rAp\|2mUp\|rAp\|dTp\|dT] |
| 1656 | GAAUGGCUUGAUUUUCUAA | [rGp\|rAp\|rAp\|2mUp\|rGp\|rGp\|2mCp\|2mUp\|2mUp\| |
| | | rGp\|rAp\|2mUp\|2mUp\|2mUp\|2 |
| | | mUp\|2mCp\|2mUp\|rAp\|rAp\|dTp\|dT] |
| 1666 | UUUCUAGAGAAAUUCAGUA | [2mUp\|2mUp\|2mUp\|2mCp\|2mUp\|rAp\|rGp\|rAp\|rGp |
| | | \|rAp\|rAp\|rAp\|2mUp\|2mUp\|2 |
| | | mCp\|rAp\|rGp\|2mUp\|rAp\|dTp\|dT] |
| 1674 | AAAUUCAGUGAACAUUAUA | [rAp\|rAp\|rAp\|2mUp\|2mUp\|2mCp\|rAp\|rGp\|2mUp\| |
| | | rGp\|rAp\|rAp\|2mCp\|rAp\|2mUp\| |
| | | 2mUp\|rAp\|2mUp\|rAp\|dTp\|dT] |
| 1676 | AAUUCAGUGAACAUUAUCA | [rAp\|rAp\|2mUp\|2mUp\|2mCp\|rAp\|rGp\|2mUp\|rGp\| |
| | | rAp\|rAp\|2mCp\|rAp\|2mUp\|2m |
| | | Up\|rAp\|2mUp\|2mCp\|rAp\|dTp\|dT] |
| 1678 | AUUCAGUGAACAUUAUCAA | [rAp\|2mUp\|2mUp\|2mCp\|rAp\|rGp\|2mUp\|rGp\|rAp\| |
| | | rAp\|2mCp\|rAp\|2mUp\|2mUp\|r |
| | | Ap\|2mUp\|2mCp\|rAp\|rAp\|dTp\|dT] |
| 1722 | UGUUGACUGCAUUUUCUCA | [2mUp\|rGp\|2mUp\|2mUp\|rGp\|rAp\|2mCp\|2mUp\|rGp |
| | | \|2mCp\|rAp\|2mUp\|2mUp\|2 |
| | | mUp\|2mUp\|2mCp\|2mUp\|2mCp\|rAp\|dTp\|dT] |
| 1762 | AGACCAACUGUACAAGAAA | [rAp\|rGp\|rAp\|2mCp\|2mCp\|rAp\|rAp\|2mCp\|2mUp\| |
| | | rGp\|2mUp\|rAp\|2mCp\|rAp\|rAp\| |
| | | rGp\|rAp\|rAp\|rAp\|dTp\|dT] |
| 1766 | ACUGUACAAGAAGAAAGAA | [rAp\|2mCp\|2mUp\|rGp\|2mUp\|rAp\|2mCp\|rAp\|rAp |
| | | \|rGp\|rAp\|rAp\|rGp\|rAp\|rAp\|rAp\|r |
| | | Gp\|rAp\|rAp\|dTp\|dT] |
| 1768 | CUGUACAAGAAGAAAGAAA | [2mCp\|2mUp\|rGp\|2mUp\|rAp\|2mCp\|rAp\|rAp\|rGp\| |
| | | rAp\|rAp\|rGp\|rAp\|rAp\|rAp\|rGp\| |
| | | rAp\|rAp\|rAp\|dTp\|dT] |
| 1836 | ACUCAGAGAGAGUAAUGAA | [rAp\|2mCp\|2mUp\|2mCp\|rAp\|rGp\|rAp\|rGp\|rAp\|r |
| | | Gp\|rAp\|rGp\|2mUp\|rAp\|rAp\|2m |
| | | Up\|rGp\|rAp\|rAp\|dTp\|dT] |
| 1838 | UCAGAGAGAGUAAUGAUAA | [2mUp\|2mCp\|rAp\|rGp\|rAp\|rGp\|rAp\|rGp\|rAp\|rG |
| | | p\|2mUp\|rAp\|rAp\|2mUp\|rGp\|rAp\| |
| | | 2mUp\|rAp\|rAp\|dTp\|dT] |
| 1842 | AGAGAGAGUAAUGAUAAUA | [rAp\|rGp\|rAp\|rGp\|rAp\|rGp\|rAp\|rGp\|2mUp\|rAp |
| | | \|rAp\|2mUp\|rGp\|rAp\|2mUp\|rAp\|rA |
| | | p\|2mUp\|rAp\|dTp\|dT] |
| 1868 | GAAAGAGCUCCUACAUAAA | [rGp\|rAp\|rAp\|rAp\|rGp\|rAp\|rGp\|2mCp\|2mUp\|2m |
| | | Cp\|2mCp\|2mUp\|rAp\|2mCp\|rAp |
| | | \|2mUp\|rAp\|rAp\|rAp\|dTp\|dT] |
| 1886 | AAACAAGUUGCAUUGAUUA | [rAp\|rAp\|rAp\|2mCp\|rAp\|rAp\|rGp\|2mUp\|2mUp\|r |
| | | Gp\|2mCp\|rAp\|2mUp\|2mUp\|rGp |
| | | \|rAp\|2mUp\|2mUp\|rAp\|dTp\|dT] |
| 1888 | AACAAGUUGCAUUGAUUAA | [rAp\|rAp\|2mCp\|rAp\|rAp\|rGp\|2mUp\|2mUp\|rGp\|2 |
| | | mCp\|rAp\|2mUp\|2mUp\|rGp\|rAp |
| | | \|2mUp\|2mUp\|rAp\|rAp\|dTp\|dT] |
| 1964 | GUGGAUGGCAUUUUCACAA | [rGp\|2mUp\|rGp\|rGp\|rAp\|2mUp\|rGp\|rGp\|2mCp\|r |
| | | Ap\|2mUp\|2mUp\|2mUp\|2mUp\| |
| | | 2mCp\|rAp\|2mCp\|rAp\|rAp\|dTp\|dT] |
| 1990 | UGCAGACAAUAUAUAUAAA | [2mUp\|rGp\|2mCp\|rAp\|rGp\|rAp\|2mCp\|rAp\|rAp\|2 |
| | | mUp\|rAp\|2mUp\|rAp\|2mUp\|rAp\| |
| | | 2mUp\|rAp\|rAp\|rAp\|dTp\|dT] |
| 2030 | GACACAGCAGAAAUAAUCA | [rGp\|rAp\|2mCp\|rAp\|2mCp\|rAp\|rGp\|2mCp\|rAp\|r |
| | | Gp\|rAp\|rAp\|rAp\|2mUp\|rAp\|rAp\| |
| | | 2mUp\|2mCp\|rAp\|dTp\|dT] |
| 2108 | AUGCUACACUUGAGUAUUA | [rAp\|2mUp\|rGp\|2mCp\|2mUp\|rAp\|2mCp\|rAp\|2mCp |
| | | \|2mUp\|2mUp\|rGp\|rAp\|rGp\|2 |
| | | mUp\|rAp\|2mUp\|2mUp\|rAp\|dTp\|dT] |
| 2128 | GAGAUGUGAAAUCCUUAAA | [rGp\|rAp\|rGp\|rAp\|2mUp\|rGp\|2mUp\|rGp\|rAp\|rA |
| | | p\|rAp\|2mUp\|2mCp\|2mCp\|2mUp |
| | | 2mUp\|rAp\|rAp\|rAp\|dTp\|dT] |
| 2230 | AACAAGUCCCUGAUUUUGA | [rAp\|rAp\|2mCp\|rAp\|rAp\|rGp\|2mUp\|2mCp\|2mCp\| |
| | | 2mCp\|2mUp\|rGp\|rAp\|2mUp\|2 |
| | | mUp\|2mUp\|2mUp\|rGp\|rAp\|dTp\|dT] |
| 2242 | UUUUGUCACCUUCCUUUAA | [2mUp\|2mUp\|2mUp\|2mUp\|rGp\|2mUp\|2mCp\|rAp\|2m |
| | | Cp\|2mCp\|2mUp\|2mUp\|2 |
| | | mCp\|2mCp\|2mUp\|2mUp\|2mUp\|rAp\|rAp\|dTp\|dT] |
| 2246 | UCACCUUCCUUUACCAAAA | [2mUp\|2mCp\|rAp\|2mCp\|2mCp\|2mUp\|2mUp\|2mCp\|2 |
| | | mCp\|2mUp\|2mUp\|2mUp\| |
| | | rAp\|2mCp\|2mCp\|rAp\|rAp\|rAp\|rAp\|dTp\|dT] |
| 2254 | CUUUACCAAAUAACUAGAA | [2mCp\|2mUp\|2mUp\|2mUp\|rAp\|2mCp\|2mCp\|rAp\|rA |
| | | p\|rAp\|2mUp\|rAp\|rAp\|2mCp |
| | | \|2mUp\|rAp\|rGp\|rAp\|rAp\|dTp\|dT] |
| 2274 | AAGGAGUUAUGGAUUAAAA | [rAp\|rAp\|rGp\|rGp\|rAp\|rGp\|2mUp\|2mUp\|rAp\|2m |
| | | Up\|rGp\|rGp\|rAp\|2mUp\|2mUp\|r |
| | | Ap\|rAp\|rAp\|rAp\|dTp\|dT] |
| 2294 | UAAAUGUGGCUAAACUAGA | [2mUp\|rAp\|rAp\|rAp\|2mUp\|rGp\|2mUp\|rGp\|rGp\|2 |
| | | mCp\|2mUp\|rAp\|rAp\|rAp\|2mCp |
| | | \|2mUp\|rAp\|rGp\|rAp\|dTp\|dT] |
| 2330 | GAGCUGGAAGGAUUAAUAA | [rGp\|rAp\|rGp\|2mCp\|2mUp\|rGp\|rGp\|rAp\|rAp\|rG |
| | | p\|rGp\|rAp\|2mUp\|2mUp\|rAp\|rAp\| |
| | | 2mUp\|rAp\|rAp\|dTp\|dT] |
| 2334 | GGAUUAAUAAAUACGAAAA | [rGp\|rGp\|rAp\|2mUp\|2mUp\|rAp\|rAp\|2mUp\|rAp\|r |
| | | Ap\|rAp\|2mUp\|rAp\|2mCp\|rGp\|rA |
| | | p\|rAp\|rAp\|rAp\|dTp\|dT] |
| 2356 | ACUCAAGUAUUUUGCAAAA | [rAp\|2mCp\|2mUp\|2mCp\|rAp\|rAp\|rGp\|2mUp\|rAp\| |
| | | 2mUp\|2mUp\|2mUp\|2mUp\|rG |
| | | p\|2mCp\|rAp\|rAp\|rAp\|rAp\|dTp\|dT] |
| 2360 | AAGUAUUUUGCAAAGUUAA | [rAp\|rAp\|rGp\|2mUp\|rAp\|2mUp\|2mUp\|2mUp\|2mUp |
| | | \|rGp\|2mCp\|rAp\|rAp\|rAp\|rGp |
| | | \|2mUp\|2mUp\|rAp\|rAp\|dTp\|dT] |
| 2362 | GUAUUUUGCAAAGUUAUGA | [rGp\|2mUp\|rAp\|2mUp\|2mUp\|2mUp\|2mUp\|rGp\|2mC |
| | | p\|rAp\|rAp\|rAp\|rGp\|2mUp\|2 |
| | | mUp\|rAp\|2mUp\|rGp\|rAp\|dTp\|dT] |
| 2448 | CAACUGUACAAAAUAACUA | [2mCp\|rAp\|rAp\|2mCp\|2mUp\|rGp\|2mUp\|rAp\|2mCp |
| | | \|rAp\|rAp\|rAp\|rAp\|2mUp\|rAp\| |
| | | rAp\|2mCp\|2mUp\|rAp\|dTp\|dT] |
| 2502 | ACAUGUGAGCAUAAAAUUA | [rAp\|2mCp\|rAp\|2mUp\|rGp\|2mUp\|rGp\|rAp\|rGp\|2 |
| | | mCp\|rAp\|2mUp\|rAp\|rAp\|rAp\|rA |
| | | p\|2mUp\|2mUp\|rAp\|dTp\|dT] |
| 2504 | CAUGUGAGCAUAAAAUUAA | [2mCp\|rAp\|2mUp\|rGp\|2mUp\|rGp\|rAp\|rGp\|2mCp\| |
| | | rAp\|2mUp\|rAp\|rAp\|rAp\|rAp\|2 |
| | | mUp\|2mUp\|rAp\|rAp\|dTp\|dT] |
| 2516 | AAUUAUGACCAUGGUAUAA | [rAp\|rAp\|2mUp\|2mUp\|rAp\|2mUp\|rGp\|rAp\|2mCp\| |
| | | 2mCp\|rAp\|2mUp\|rGp\|rGp\|2m |
| | | Up\|rAp\|2mUp\|rAp\|rAp\|dTp\|dT] |
| 2518 | AUUAUGACCAUGGUAUAUA | [rAp\|2mUp\|2mUp\|rAp\|2mUp\|rGp\|rAp\|2mCp\|2mCp |
| | | \|rAp\|2mUp\|rGp\|rGp\|2mUp\|r |
| | | Ap\|2mUp\|rAp\|2mUp\|rAp\|dTp\|dT] |
| 2578 | AUAAACACUCUUGAAUAGA | [rAp\|2mUp\|rAp\|rAp\|rAp\|2mCp\|rAp\|2mCp\|2mUp\| |
| | | 2mCp\|2mUp\|2mUp\|rGp\|rAp\|r |
| | | Ap\|2mUp\|rAp\|rGp\|rAp\|dTp\|dT] |
| 2580 | UAAACACUCUUGAAUAGAA | [2mUp\|rAp\|rAp\|rAp\|2mCp\|rAp\|2mCp\|2mUp\|2mCp |
| | | \|2mUp\|2mUp\|rGp\|rAp\|rAp\|2 |
| | | mUp\|rAp\|rGp\|rAp\|rAp\|dTp\|dT] |
| 2592 | AUAGACUUCCACUUUGUAA | [rAp\|2mUp\|rAp\|rGp\|rAp\|2mCp\|2mUp\|2mUp\|2mCp |
| | | \|2mCp\|rAp\|2mCp\|2mUp\|2m |
| | | Up\|2mUp\|rGp\|2mUp\|rAp\|rAp\|dTp\|dT] |
| 2596 | AGACUUCCACUUUGUAAUA | [rAp\|rGp\|rAp\|2mCp\|2mUp\|2mUp\|2mCp\|2mCp\|rAp |
| | | \|2mCp\|2mUp\|2mUp\|2mUp\|r |
| | | Gp\|2mUp\|rAp\|rAp\|2mUp\|rAp\|dTp\|dT] |
| 2602 | CUUCCACUUUGUAAUUAGA | [2mCp\|2mUp\|2mUp\|2mCp\|2mCp\|rAp\|2mCp\|2mUp\|2 |
| | | mUp\|2mUp\|rGp\|2mUp\|rA |
| | | p\|rAp\|2mUp\|2mUp\|rAp\|rGp\|Ap\|dTp\|dT] |
| 2654 | CUUAAGUGGCAGAAUAUAA | [2mCp\|2mUp\|2mUp\|rAp\|rAp\|rGp\|2mUp\|rGp\|rGp\| |
| | | 2mCp\|rAp\|rGp\|rAp\|rAp\|2mUp |
| | | \|rAp\|2mUp\|rAp\|rAp\|dTp\|dT] |
| 2656 | UUAAGUGGCAGAAUAUAAA | [2mUp\|2mUp\|rAp\|rAp\|rGp\|2mUp\|rGp\|rGp\|2mCp\| |
| | | rAp\|rGp\|rAp\|rAp\|2mUp\|rAp\|2 |
| | | mUp\|rAp\|rAp\|rAp\|dTp\|dT] |
| 2686 | UUUUGGAGGGUGAUAUAAA | [2mUp\|2mUp\|2mUp\|2mUp\|rGp\|rGp\|rAp\|rGp\|rGp\| |
| | | rGp\|2mUp\|rGp\|rAp\|2mUp\|rA |
| | | p\|2mUp\|rAp\|rAp\|rAp\|dTp\|dT] |
| 2762 | UCCACCAAGAACAUAAGAA | [2mUp\|2mCp\|2mCp\|rAp\|2mCp\|2mCp\|rAp\|rAp\|rGp |
| | | \|rAp\|rAp\|2mCp\|rAp\|2mUp\|r |
| | | Ap\|rAp\|rGp\|rAp\|rAp\|dTp\|dT] |
| 2768 | ACCAAGAACAUAAGAAUUA | [rAp\|2mCp\|2mCp\|rAp\|rAp\|rGp\|rAp\|rAp\|2mCp\| |
| | | rAp\|2mUp\|rAp\|rAp\|rGp\|rAp\|rAp\| |
| | | 2mUp\|2mUp\|rAp\|dTp\|dT] |
| 2782 | UAGAAUUAUCAAGCUUUUA | [2mUp\|rAp\|rGp\|rAp\|rAp\|2mUp\|2mUp\|rAp\|2mUp\| |
| | | 2mCp\|rAp\|rAp\|rGp\|2mCp\|2m |
| | | Up\|2mUp\|2mUp\|2mUp\|rAp\|dTp\|dT] |
| 2844 | UUGGAUGAAAUUAUUUGUA | [2mUp\|2mUp\|rGp\|rGp\|rAp\|2mUp\|rGp\|rAp\|rAp\|r |
| | | Ap\|2mUp\|2mUp\|rAp\|2mUp\|2m |
| | | Up\|2mUp\|rGp\|2mUp\|rAp\|dTp\|dT] |
| 2846 | GAUGAAAUUAUUUGUCAUA | [rGp\|rAp\|2mUp\|rGp\|rAp\|rAp\|rAp\|2mUp\|2mUp\|r |
| | | Ap\|2mUp\|2mUp\|2mUp\|rGp\|2m |
| | | Up\|2mCp\|rAp\|2mUp\|rAp\|dTp\|dT] |

[0397] For the chemical modifications, “2m” means 2′-O-Methyl ribonucleotides, “r” means ribonucleotide, “p” means phosphate linkage, and “d” means deoxyribonucleotide.

TABLE 14
Chemical Modifications for Antisense Strands

| SEQ ID | | |
|---|---|---|
| No./ | | |
| Antisense | | |
| No. | Antisense | Antisense Chemical Modifications |
| 79 | UAUUUCUUUGGCUCAGAGU | [rUp\|rAp\|rUp\|rUp\|rUp\|rCp\|rUp\|rUp\|rUp\| |
| | | rGp\|rGp\|rCp\|rUp\|2mCp\|rAp\|rGp\|rAp\|rG |
| | | p\|rUp\|dTp\|dT] |
| 83 | UAGACAUUUCUUUGGCUCA | [rUp\|rAp\|rGp\|rAp\|2mCp\|rAp\|rUp\|rUp\|rUp |
| | | \|rCp\|rUp\|rUp\|rUp\|rGp\|rGp\|rCp\|rUp\|2 |
| | | mCp\|rAp\|dTp\|dT] |
| 105 | UUACUUUGAGGAAGGGCAG | [rUp\|2mUp\|rAp\|rCp\|rUp\|rUp\|rUp\|rGp\|rAp |
| | | \|rGp\|rGp\|rAp\|rAp\|rGp\|rGp\|rGp\|2mCp\| |
| | | rAp\|rGp\|dTp\|dT] |
| 149 | UGUACAUUUUGGCAGAACU | [rUp\|rGp\|2mUp\|rAp\|2mCp\|rAp\|rUp\|rUp\|rU |
| | | p\|rUp\|rGp\|rGp\|2mCp\|rAp\|rGp\|rAp\|rA |
| | | p\|rCp\|rUp\|dTp\|dT] |
| 159 | UUAUCAUCAAAAUCAGUAC | [rUp\|2mUp\|rAp\|rUp\|2mCp\|rAp\|rUp\|2mCp\|r |
| | | Ap\|rAp\|rAp\|rAp\|rUp\|2mCp\|rAp\|rGp\| |
| | | 2mUp\|rAp\|rCp\|dTp\|dT] |
| 161 | UGAUAUCAUCAAAAUCAGU | [rUp\|rGp\|rAp\|2mUp\|rAp\|rUp\|2mCp\|rAp\|rU |
| | | p\|2mCp\|rAp\|rAp\|rAp\|rAp\|rUp\|2mCp\|r |
| | | Ap\|rGp\|rUp\|dTp\|dT] |
| 191 | UAGAAGAAACUGCAUUCUU | [rUp\|rAp\|rGp\|rAp\|rAp\|rGp\|rAp\|rAp\|rAp\| |
| | | rCp\|rUp\|rGp\|2mCp\|rAp\|rUp\|rUp\|rCp\|rU |
| | | p\|rUp\|dTp\|dT] |
| 241 | UAUUUGAUGAUCCAAACUG | [rUp\|rAp\|rUp\|rUp\|rUp\|rGp\|rAp\|rUp\|rGp\| |
| | | rAp\|rUp\|rCp\|2mCp\|rAp\|rAp\|rAp\|rCp\|rU |
| | | p\|rGp\|dTp\|dT] |
| 245 | UGUAUUUGAUGAUCCAAAC | [rUp\|rGp\|2mUp\|rAp\|rUp\|rUp\|rUp\|rGp\|rAp |
| | | \|rUp\|rGp\|rAp\|rUp\|rCp\|2mCp\|rAp\|rAp\|r |
| | | Ap\|rCp\|dTp\|dT] |
| 247 | UUGUAUUUGAUGAUCCAAA | [rUp\|rUp\|rGp\|2mUp\|rAp\|rUp\|rUp\|rUp\|rGp |
| | | \|rAp\|rUp\|rGp\|rAp\|rUp\|rCp\|2mCp\|rAp\|r |
| | | Ap\|rAp\|dTp\|dT] |
| 251 | UCUUGUAUUUGAUGAUCCA | [rUp\|rCp\|rUp\|rUp\|rGp\|2mUp\|rAp\|rUp\|rUp |
| | | \|rUp\|rGp\|rAp\|rUp\|rGp\|rAp\|rUp\|rCp\|2 |
| | | mCp\|rAp\|dTp\|dT] |
| 253 | UACUUGUAUUUGAUGAUCC | [rUp\|rAp\|rCp\|rUp\|rUp\|rGp\|2mUp\|rAp\|rUp |
| | | \|rUp\|rUp\|rGp\|rAp\|rUp\|rGp\|rAp\|rUp\|rC |
| | | p\|rCp\|dTp\|dT] |
| 261 | UAAAUUUUCAUGACUUGUA | [rUp\|rAp\|rAp\|rAp\|rUp\|rUp\|rUp\|rUp\|2mCp |
| | | \|rAp\|rUp\|rGp\|rAp\|rCp\|rUp\|rUp\|rGp\|2m |
| | | Up\|rAp\|dTp\|dT] |
| 309 | UGUAUUGUAAUUCUAGCGG | [rUp\|rGp\|2mUp\|rAp\|rUp\|rUp\|rGp\|2mUp\|rAp |
| | | \|rAp\|rUp\|rUp\|rCp\|2mUp\|rAp\|rGp\|rC |
| | | p\|rGp\|rGp\|dTp\|dT] |
| 315 | UUCUAUGUAUUGUAAUUCU | [rUp\|rUp\|rCp\|2mUp\|rAp\|rUp\|rGp\|2mUp\|rA |
| | | p\|rUp\|rUp\|rGp\|2mUp\|rAp\|rAp\|rUp\|rU |
| | | p\|rCp\|rUp\|dTp\|dT] |
| 317 | UUUCUAUGUAUUGUAAUUC | [rUp\|rUp\|rUp\|rCp\|2mUp\|rAp\|rUp\|rGp\|2mU |
| | | p\|rAp\|rUp\|rUp\|rGp\|2mUp\|rAp\|rAp\|rU |
| | | p\|rUp\|rCp\|dTp\|dT] |
| 355 | UUAUAUCCACAUUCCACAC | [rUp\|2mUp\|rAp\|2mUp\|rAp\|rUp\|rCp\|2mCp\|r |
| | | Ap\|2mCp\|rAp\|rUp\|rUp\|rCp\|2mCp\|rA |
| | | p\|2mCp\|rAp\|rCp\|dTp\|dT] |
| 357 | UUUAUAUCCACAUUCCACA | [rUp\|rUp\|2mUp\|rAp\|2mUp\|rAp\|rUp\|rCp\|2m |
| | | Cp\|rAp\|2mCp\|rAp\|rUp\|rUp\|rCp\|2mC |
| | | p\|rAp\|2mCp\|rAp\|dTp\|dT] |
| 361 | UACUUAUAUCCACAUUCCA | [rUp\|rAp\|rCp\|rUp\|2mUp\|rAp\|2mUp\|rAp\|rU |
| | | p\|rCp\|2mCp\|rAp\|2mCp\|rAp\|rUp\|rUp\|r |
| | | Cp\|2mCp\|rAp\|dTp\|dT] |
| 363 | UUACUUAUAUCCACAUUCC | [rUp\|2mUp\|rAp\|rCp\|rUp\|2mUp\|rAp\|2mUp\|r |
| | | Ap\|rUp\|rCp\|2mCp\|rAp\|2mCp\|rAp\|rU |
| | | p\|rUp\|rCp\|rCp\|dTp\|dT] |
| 365 | UAUACUUAUAUCCACAUUC | [rUp\|rAp\|2mUp\|rAp\|rCp\|rUp\|2mUp\|rAp\|2m |
| | | Up\|rAp\|rUp\|rCp\|2mCp\|rAp\|2mCp\|rA |
| | | p\|rUp\|rUp\|rCp\|dTp\|dT] |
| 369 | UCUAUACUUAUAUCCACAU | [rUp\|rCp\|2mUp\|rAp\|2mUp\|rAp\|rCp\|rUp\|2m |
| | | Up\|rAp\|2mUp\|rAp\|rUp\|rCp\|2mCp\|rA |
| | | p\|2mCp\|rAp\|rUp\|dTp\|dT] |
| 371 | UUCUAUACUUAUAUCCACA | [rUp\|rUp\|rCp\|2mUp\|rAp\|2mUp\|rAp\|rCp\|rU |
| | | p\|2mUp\|rAp\|2mUp\|rAp\|rUp\|rCp\|2mC |
| | | p\|rAp\|2mCp\|rAp\|dTp\|dT] |
| 373 | UAAUCUAUACUUAUAUCCA | [rUp\|rAp\|rAp\|rUp\|rCp\|2mUp\|rAp\|2mUp\|rA |
| | | p\|rCp\|rUp\|2mUp\|rAp\|2mUp\|rAp\|rUp\|r |
| | | Cp\|2mCp\|rAp\|dTp\|dT] |
| 379 | UGCAAUAAAUAUUGAGCUC | [rUp\|rGp\|2mCp\|rAp\|rAp\|2mUp\|rAp\|rAp\|rA |
| | | p\|2mUp\|rAp\|rUp\|rUp\|rGp\|rAp\|rGp\|rC |
| | | p\|rUp\|rCp\|dTp\|dT] |
| 415 | UAUAAAGUUGUGAUCUAAA | [rUp\|rAp\|2mUp\|rAp\|rAp\|rAp\|rGp\|rUp\|rUp |
| | | \|rGp\|rUp\|rGp\|rAp\|rUp\|rCp\|2mUp\|rAp\|r |
| | | Ap\|rAp\|dTp\|dT] |
| 417 | UCAUAAAGUUGUGAUCUAA | [rUp\|2mCp\|rAp\|2mUp\|rAp\|rAp\|rAp\|rGp\|rU |
| | | p\|rUp\|rGp\|rUp\|rGp\|rAp\|rUp\|rCp\|2mU |
| | | p\|rAp\|rAp\|dTp\|dT] |
| 419 | UUCAUAAAGUUGUGAUCUA | [rUp\|rUp\|2mCp\|rAp\|2mUp\|rAp\|rAp\|rAp\|rG |
| | | p\|rUp\|rUp\|rGp\|rUp\|rGp\|rAp\|rUp\|rCp\| |
| | | 2mUp\|rAp\|dTp\|dT] |
| 475 | UUUAUAUCCUUUUGCCACC | [rUp\|rUp\|2mUp\|rAp\|2mUp\|rAp\|rUp\|rCp\|rC |
| | | p\|rUp\|rUp\|rUp\|rUp\|rGp\|rCp\|2mCp\|rA |
| | | p\|rCp\|rCp\|dTp\|dT] |
| 477 | UCUUAUAUCCUUUUGCCAC | [rUp\|rCp\|rUp\|2mUp\|rAp\|2mUp\|rAp\|rUp\|r |
| | | Cp\|rCp\|rUp\|rUp\|rUp\|rUp\|rGp\|rCp\|2mC |
| | | p\|rAp\|rCp\|dTp\|dT] |
| 479 | UCCUUAUAUCCUUUUGCCA | [rUp\|rCp\|rCp\|rUp\|2mUp\|rAp\|2mUp\|rAp\|rU |
| | | p\|rCp\|rCp\|rUp\|rUp\|rUp\|rUp\|rGp\|rCp\| |
| | | 2mCp\|rAp\|dTp\|dT] |
| 481 | UACCUUAUAUCCUUUUGCC | [rUp\|rAp\|rCp\|rCp\|rUp\|2mUp\|rAp\|2mUp\|rA |
| | | p\|rUp\|rCp\|rCp\|rUp\|rUp\|rUp\|rUp\|rGp\|r |
| | | Cp\|rCp\|dTp\|dT] |
| 503 | UUUCAGUUUGCUUCACAAC | [rUp\|rUp\|rUp\|2mCp\|rAp\|rGp\|rUp\|rUp\|rUp |
| | | \|rGp\|rCp\|rUp\|rUp\|2mCp\|rAp\|2mCp\|rA |
| | | p\|rAp\|rCp\|dTp\|dT] |
| 513 | UUUAAUGCUGCAGUUUCAG | [rUp\|rUp\|2mUp\|rAp\|rAp\|rUp\|rGp\|rCp\|rUp |
| | | \|rGp\|2mCp\|rAp\|rGp\|rUp\|rUp\|rUp\|2mC |
| | | p\|rAp\|rGp\|dTp\|dT] |
| 553 | UAAAAGAGUGAACUUCUGU | [rUp\|rAp\|rAp\|rAp\|rAp\|rGp\|rAp\|rGp\|rUp\| |
| | | rGp\|rAp\|rAp\|rCp\|rUp\|rUp\|rCp\|rUp\|rGp\| |
| | | rUp\|dTp\|dT] |
| 559 | UUCAAUUUCCGGGAAAAGA | [rUp\|rUp\|2mCp\|rAp\|rAp\|rUp\|rUp\|rUp\|rCp |
| | | \|rCp\|rGp\|rGp\|rGp\|rAp\|rAp\|rAp\|rAp\|rG |
| | | p\|rAp\|dTp\|dT] |
| 561 | UGUCAAUUUCCGGGAAAAG | [rUp\|rGp\|rUp\|2mCp\|rAp\|rAp\|rUp\|rUp\|rUp |
| | | \|rCp\|rCp\|rGp\|rGp\|rGp\|rAp\|rAp\|rAp\|rA |
| | | p\|rGp\|dTp\|dT] |
| 583 | UGUAGAUUUUGUAUAAAGG | [rUp\|rGp\|2mUp\|rAp\|rGp\|rAp\|rUp\|rUp\|rUp |
| | | \|rUp\|rGp\|2mUp\|rAp\|2mUp\|rAp\|rAp\|rA |
| | | p\|rGp\|rGp\|dTp\|dT] |
| 617 | UUUGAUUAGGGGAUUCACA | [rUp\|rUp\|rUp\|rGp\|rAp\|rUp\|2mUp\|rAp\|rGp |
| | | \|rGp\|rGp\|rGp\|rAp\|rUp\|rUp\|2mCp\|rAp\| |
| | | 2mCp\|rAp\|dTp\|dT] |
| 619 | UCUUGAUUAGGGGAUUCAC | [rUp\|rCp\|rUp\|rUp\|rGp\|rAp\|rUp\|2mUp\|rAp |
| | | \|rGp\|rGp\|rGp\|rGp\|rAp\|rUp\|rUp\|2mCp\| |
| | | rAp\|rCp\|dTp\|dT] |
| 635 | UCAUUUACAGCAUCAUCCA | [rUp\|2mCp\|rAp\|rUp\|rUp\|2mUp\|rAp\|2mCp\|r |
| | | Ap\|rGp\|2mCp\|rAp\|rUp\|2mCp\|rAp\|rU |
| | | p\|rCp\|2mCp\|rAp\|dTp\|dT] |
| 637 | UAACAUUUACAGCAUCAUC | [rUp\|rAp\|rAp\|2mCp\|rAp\|rUp\|rUp\|2mUp\|rA |
| | | p\|2mCp\|rAp\|rGp\|2mCp\|rAp\|rUp\|2mC |
| | | p\|rAp\|rUp\|rCp\|dTp\|dT] |
| 643 | UUUAUCUCAUCAACAUUUA | [rUp\|rUp\|2mUp\|rAp\|rUp\|rCp\|rUp\|2mCp\|rA |
| | | p\|rUp\|2mCp\|rAp\|rAp\|2mCp\|rAp\|rUp\|r |
| | | Up\|2mUp\|rAp\|dTp\|dT] |
| 647 | UGUCAUUAUCUCAUCAACA | [rUp\|rGp\|rUp\|2mCp\|rAp\|rUp\|2mUp\|rAp\|rU |
| | | p\|rCp\|rUp\|2mCp\|rAp\|rUp\|2mCp\|rAp\| |
| | | rAp\|2mCp\|rAp\|dTp\|dT] |
| 649 | UAGUCAUUAUCUCAUCAAC | [rUp\|rAp\|rGp\|rUp\|2mCp\|rAp\|rUp\|2mUp\|rA |
| | | p\|rUp\|rCp\|rUp\|2mCp\|rAp\|rUp\|2mCp\| |
| | | rAp\|rAp\|rCp\|dTp\|dT] |
| 657 | UAAGUAUCAGUCAUUAUCU | [rUp\|rAp\|rAp\|rGp\|2mUp\|rAp\|rUp\|2mCp\|rA |
| | | p\|rGp\|rUp\|2mCp\|rAp\|rUp\|2mUp\|rAp\| |
| | | rUp\|rCp\|rUp\|dTp\|dT] |
| 661 | UAGAAGUAUCAGUCAUUAU | [rUp\|rAp\|rGp\|rAp\|rAp\|rGp\|2mUp\|rAp\|rUp |
| | | \|2mCp\|rAp\|rGp\|rUp\|2mCp\|rAp\|rUp\|2 |
| | | mUp\|rAp\|rUp\|dTp\|dT] |
| 691 | UUUCCUUAUUUUCAGAGAU | [rUp\|rUp\|rUp\|rCp\|rCp\|rUp\|2mUp\|rAp\|rUp |
| | | \|rUp\|rUp\|rUp\|2mCp\|rAp\|rGp\|rAp\|rGp\|r |
| | | Ap\|rUp\|dTp\|dT] |
| 693 | UAACAUUUUCCUUAUUUUC | [rUp\|rAp\|rAp\|2mCp\|rAp\|rUp\|rUp\|rUp\|rUp |
| | | \|rCp\|rCp\|rUp\|2mUp\|rAp\|rUp\|rUp\|rUp\|r |
| | | Up\|rCp\|dTp\|dT] |
| 719 | UACUAUCAAACACAACCUC | [rUp\|rAp\|rCp\|2mUp\|rAp\|rUp\|2mCp\|rAp\|rA |
| | | p\|rAp\|2mCp\|rAp\|2mCp\|rAp\|rAp\|rCp\|r |
| | | Cp\|rUp\|rCp\|dTp\|dT] |
| 721 | UAACUAUCAAACACAACCU | [rUp\|rAp\|rAp\|rCp\|2mUp\|rAp\|rUp\|2mCp\|rA |
| | | p\|rAp\|rAp\|2mCp\|rAp\|2mCp\|rAp\|rAp\|r |
| | | Cp\|rCp\|rUp\|dTp\|dT] |
| 723 | UAAACUAUCAAACACAACC | [rUp\|rAp\|rAp\|rAp\|rCp\|2mUp\|rAp\|rUp\|2mC |
| | | p\|rAp\|rAp\|rAp\|2mCp\|rAp\|2mCp\|rAp\|r |
| | | Ap\|rCp\|rCp\|dTp\|dT] |
| 797 | UAAUUCUGUCAUCCUGCAC | [rUp\|rAp\|rAp\|rUp\|rUp\|rCp\|rUp\|rGp\|rUp\| |
| | | 2mCp\|rAp\|rUp\|rCp\|rCp\|rUp\|rGp\|2mCp\|r |
| | | Ap\|rCp\|dTp\|dT] |
| 821 | UAAUGUUAUCCAUCCUUUC | [rUp\|rAp\|rAp\|rUp\|rGp\|rUp\|2mUp\|rAp\|rUp |
| | | \|rCp\|2mCp\|rAp\|rUp\|rCp\|rCp\|rUp\|rUp\|r |
| | | Up\|rCp\|dTp\|dT] |
| 823 | UAAAUGUUAUCCAUCCUUU | [rUp\|rAp\|rAp\|rAp\|rUp\|rGp\|rUp\|2mUp\|rAp |
| | | \|rUp\|rCp\|2mCp\|rAp\|rUp\|rCp\|rCp\|rUp\|r |
| | | Up\|rUp\|dTp\|dT] |
| 827 | UUCAAAAUAAAUGUUAUCC | [rUp\|rUp\|2mCp\|rAp\|rAp\|rAp\|rAp\|2mUp\|rA |
| | | p\|rAp\|rAp\|rUp\|rGp\|rUp\|2mUp\|rAp\|rU |
| | | p\|rCp\|rCp\|dTp\|dT] |
| 849 | UCAUAAAACUCUGUAACUG | [rUp\|2mCp\|rAp\|2mUp\|rAp\|rAp\|rAp\|rAp\|rC |
| | | p\|rUp\|rCp\|rUp\|rGp\|2mUp\|rAp\|rAp\|rC |
| | | p\|rUp\|rGp\|dTp\|dT] |
| 853 | UUUGCAUAAAACUCUGUAA | [rUp\|rUp\|rUp\|rGp\|2mCp\|rAp\|2mUp\|rAp\|rA |
| | | p\|rAp\|rAp\|rCp\|rUp\|rCp\|rUp\|rGp\|2mu |
| | | p\|rAp\|rAp\|dTp\|dT] |
| 855 | UUUUGCAUAAAACUCUGUA | [rUp\|rUp\|rUp\|rUp\|rGp\|2mCp\|rAp\|2mUp\|rA |
| | | p\|rAp\|rAp\|rAp\|rCp\|rUp\|rCp\|rUp\|rGp\| |
| | | 2mUp\|rAp\|dTp\|dT] |
| 901 | UUAACAAUGCCAGAAAUAA | [rUp\|2mUp\|rAp\|rAp\|2mCp\|rAp\|rAp\|rUp\|rG |
| | | p\|rCp\|2mCp\|rAp\|rGp\|rAp\|rAp\|rAp\|2m |
| | | Up\|rAp\|rAp\|dTp\|dT] |
| 915 | UAAAUCACAGGCUUCUCUA | [rUp\|rAp\|rAp\|rAp\|rUp\|2mCp\|rAp\|2mCp\|rA |
| | | p\|rGp\|rGp\|rCp\|rUp\|rUp\|rCp\|rUp\|rCp\| |
| | | 2mUp\|rAp\|dTp\|dT] |
| 929 | UUUAUGAUGGCAGCCAAAG | [rUp\|rUp\|2mUp\|rAp\|rUp\|rGp\|rAp\|rUp\|rGp |
| | | \|rGp\|2mCp\|rAp\|rGp\|rCp\|2mCp\|rAp\|rA |
| | | p\|rAp\|rGp\|dTp\|dT] |
| 931 | UUUUAUGAUGGCAGCCAAA | [rUp\|rUp\|rUp\|2mUp\|rAp\|rUp\|rGp\|rAp\|rUp |
| | | \|rGp\|rGp\|2mCp\|rAp\|rGp\|rCp\|2mCp\|rA |
| | | p\|rAp\|rAp\|dTp\|dT] |
| 935 | UUAUUUUAUGAUGGCAGCC | [rUp\|2mUp\|rAp\|rUp\|rUp\|rUp\|2mUp\|rAp\|rU |
| | | p\|rGp\|rAp\|rUp\|rGp\|rGp\|2mCp\|rAp\|rG |
| | | p\|rCp\|rCp\|dTp\|dT] |
| 937 | UGUAUUUUAUGAUGGCAGC | [rUp\|rGp\|2mUp\|rAp\|rUp\|rUp\|rUp\|2mUp\|rA |
| | | p\|rUp\|rGp\|rAp\|rUp\|rGp\|rGp\|2mCp\|rA |
| | | p\|rGp\|rCp\|dTp\|dT] |
| 947 | UGUUGAAUUCUUUGAGGUA | [rUp\|rGp\|rUp\|rUp\|rGp\|rAp\|rAp\|rUp\|rUp\| |
| | | rCp\|rUp\|rUp\|rUp\|rGp\|rAp\|rGp\|rGp\|2mU |
| | | p\|rAp\|dTp\|dT] |
| 949 | UAAGUUGAAUUCUUUGAGG | [rUp\|rAp\|rAp\|rGp\|rUp\|rUp\|rGp\|rAp\|rAp\| |
| | | rUp\|rUp\|rCp\|rUp\|rUp\|rUp\|rGp\|rAp\|rGp\| |
| | | rGp\|dTp\|dT] |
| 967 | UAAUUCUCAGGUUUGGAGA | [rUp\|rAp\|rAp\|rUp\|rUp\|rCp\|rUp\|2mCp\|rAp |
| | | \|rGp\|rGp\|rUp\|rUp\|rUp\|rGp\|rGp\|rAp\|rG |
| | | p\|rAp\|dTp\|dT] |
| 971 | UGUUUAAAAUUCUCAGGUU | [rUp\|rGp\|rUp\|rUp\|2mUp\|rAp\|rAp\|rAp\|rAp |
| | | \|rUp\|rUp\|rCp\|rUp\|2mCp\|rAp\|rGp\|rGp\|r |
| | | Up\|rUp\|dTp\|dT] |
| 973 | UCUGUUUAAAAUUCUCAGG | [rUp\|rCp\|rUp\|rGp\|rUp\|rUp\|2mUp\|rAp\|rA |
| | | p\|rAp\|rAp\|rUp\|rUp\|rCp\|rUp\|2mCp\|rAp\|r |
| | | Gp\|rGp\|dTp\|dT] |
| 989 | UUCCAUUUUACUUGAUAGC | [rUp\|rUp\|rCp\|2mCp\|rAp\|rUp\|rUp\|rUp\|2mU |
| | | p\|rAp\|rCp\|rUp\|rUp\|rGp\|rAp\|2mUp\|rA |
| | | p\|rGp\|rCp\|dTp\|dT] |
| 991 | UUUCCAUUUUACUUGAUAG | [rUp\|rUp\|rUp\|rCp\|2mCp\|rAp\|rUp\|rUp\|rUp |
| | | \|2mUp\|rAp\|rCp\|rUp\|rUp\|rGp\|rAp\|2mU |
| | | p\|rAp\|rGp\|dTp\|dT] |
| 993 | UAUUCCAUUUUACUUGAUA | [rUp\|rAp\|rUp\|rUp\|rCp\|2mCp\|rAp\|rUp\|rUp |
| | | \|rUp\|2mUp\|rAp\|rCp\|rUp\|rUp\|rGp\|rAp\| |
| | | 2mUp\|rAp\|dTp\|dT] |
| 995 | UAAAUUCCAUUUUACUUGA | [rUp\|rAp\|rAp\|rAp\|rUp\|rUp\|rCp\|2mCp\|rAp |
| | | \|rUp\|rUp\|rUp\|2mUp\|rAp\|rCp\|rUp\|rUp\|r |
| | | Gp\|rAp\|dTp\|dT] |
| 997 | UUAAAUUCCAUUUUACUUG | [rUp\|2mUp\|rAp\|rAp\|rAp\|rUp\|rUp\|rCp\|2mC |
| | | p\|rAp\|rUp\|rUp\|rUp\|2mUp\|rAp\|rCp\|rU |
| | | p\|rUp\|rGp\|dTp\|dT] |
| 1007 | UUUCCAUUAAUUGUCAUAA | [rUp\|rUp\|rUp\|rCp\|2mCp\|rAp\|rUp\|2mUp\|rA |
| | | p\|rAp\|rUp\|rUp\|rGp\|rUp\|2mCp\|rAp\|2 |
| | | mUp\|rAp\|rAp\|dTp\|dT] |
| 1021 | UAUUCCUUAAUGUUGUUCC | [rUp\|rAp\|rUp\|rUp\|rCp\|rCp\|rUp\|2mUp\|rAp |
| | | \|rAp\|rUp\|rGp\|rUp\|rUp\|rGp\|rUp\|rUp\|rC |
| | | p\|rCp\|dTp\|dT] |
| 1032 | UAUUCUGUAGGAUUUCCAG | [rUp\|rAp\|rUp\|rUp\|rCp\|rUp\|rGp\|2mUp\|rA |
| | | p\|rGp\|rGp\|rAp\|rUp\|rUp\|rUp\|rCp\|2mCp\| |
| | | rAp\|rGp\|dTp\|dT] |
| 1055 | UGUUUUCAUAUCAGUCUGA | [rUp\|rGp\|rUp\|rUp\|rUp\|rUp\|2mCp\|rAp\|2mU |
| | | p\|rAp\|rUp\|2mCp\|rAp\|rGp\|rUp\|rCp\|rU |
| | | p\|rGp\|rAp\|dTp\|dT] |
| 1057 | UUUGGUUUUCAUAUCAGUC | [rUp\|rUp\|rUp\|rGp\|rGp\|rUp\|rUp\|rUp\|rUp |
| | | \|2mCp\|rAp\|2mUp\|rAp\|rUp\|2mCp\|rAp\|rG |
| | | p\|rUp\|rCp\|dTp\|dT] |
| 1059 | UUUUGGUUUUCAUAUCAGU | [rUp\|rUp\|rUp\|rUp\|rGp\|rGp\|rUp\|rUp\|rUp\| |
| | | rUp\|2mCp\|rAp\|2mUp\|rAp\|rUp\|2mCp\|rA |
| | | p\|rGp\|rUp\|dTp\|dT] |
| 1077 | UGUCUAAAACCCACAGCAA | [rUp\|rGp\|rUp\|rCp\|2mUp\|rAp\|rAp\|rAp\|rAp |
| | | \|rCp\|rCp\|2mCp\|rAp\|2mCp\|rAp\|rGp\|2 |
| | | mCp\|rAp\|rAp\|dTp\|dT] |
| 1089 | UUUUAGUGUGGUCUAAAAC | [rUp\|rUp\|rUp\|2mUp\|rAp\|rGp\|rUp\|rGp\|rUp |
| | | \|rGp\|rGp\|rUp\|rCp\|2mUp\|rAp\|rAp\|rAp\| |
| | | rAp\|rCp\|dTp\|dT] |
| 1097 | UGAAGUUUUAGUGUGGUCU | [rUp\|rGp\|rAp\|rAp\|rGp\|rUp\|rUp\|rUp\|2mUp |
| | | \|rAp\|rGp\|rUp\|rGp\|rUp\|rGp\|rGp\|rUp\|rC |
| | | p\|rUp\|dTp\|dT] |
| 1099 | UAAUGAAGUUUUAGUGUGG | [rUp\|rAp\|rAp\|rUp\|rGp\|rAp\|rAp\|rGp\|rUp\| |
| | | rUp\|rUp\|2mUp\|rAp\|rGp\|rUp\|rGp\|rUp\|rG |
| | | p\|rGp\|dTp\|dT] |
| 1111 | UCUUUAACUUCCGUCUCCC | [rUp\|rCp\|rUp\|rUp\|2mUp\|rAp\|rAp\|rCp\|rUp |
| | | \|rUp\|rCp\|rCp\|rGp\|rUp\|rCp\|rUp\|rCp\|rC |
| | | p\|rCp\|dTp\|dT] |
| 1113 | UUCUUUAACUUCCGUCUCC | [rUp\|rUp\|rCp\|rUp\|rUp\|2mUp\|rAp\|rAp\|rCp |
| | | \|rUp\|rUp\|rCp\|rCp\|rGp\|rUp\|rCp\|rUp\|rC |
| | | p\|rCp\|dTp\|dT] |
| 1127 | UAUUUAAGGAGUGGCUGGG | [rUp\|rAp\|rUp\|rUp\|2mUp\|rAp\|rAp\|rGp\|rGp |
| | | \|rAp\|rGp\|rUp\|rGp\|rGp\|rCp\|rUp\|rGp\|rG |
| | | p\|rGp\|dTp\|dT] |
| 1215 | UAUUUUCUAUCUGACCAAA | [rUp\|rAp\|rUp\|rUp\|rUp\|rUp\|rCp\|2mUp\|rAp |
| | | \|rUp\|rCp\|rUp\|rGp\|rAp\|rCp\|2mCp\|rAp\|r |
| | | Ap\|rAp\|dTp\|dT] |
| 1221 | UUAGAUGAUUUUCUAUCUG | [rUp\|2mUp\|rAp\|rGp\|rAp\|rUp\|rGp\|rAp\|rUp |
| | | \|rUp\|rUp\|rUp\|rCp\|2mUp\|rAp\|rUp\|rCp\|r |
| | | Up\|rGp\|dTp\|dT] |
| 1230 | UCAAUUUACGUAGAUGAUU | [rUp\|2mCp\|rAp\|rAp\|rUp\|rUp\|2mUp\|rAp\|rC |
| | | p\|rGp\|2mUp\|rAp\|rGp\|rAp\|rUp\|rGp\|rA |
| | | prUp\|rUp\|dTp\|dT] |
| 1307 | UAUUAUUGCUUGAAAUUCU | [rUp\|rAp\|rUp\|2mUp\|rAp\|rUp\|rUp\|rGp\|rCp |
| | | \|rUp\|rUp\|rGp\|rAp\|rAp\|rAp\|rUp\|rUp\|rC |
| | | p\|rUp\|dTp\|dT] |
| 1309 | UGGUAUUAUUGCUUGAAAU | [rUp\|rGp\|rGp\|2mUp\|rAp\|rUp\|2mUp\|rAp\|rU |
| | | p\|rUp\|rGp\|rCp\|rUp\|rUp\|rGp\|rAp\|rAp\| |
| | | rAp\|rUp\|dTp\|dT] |
| 1311 | UAGGUAUUAUUGCUUGAAA | [rUp\|rAp\|rGp\|rGp\|2mUp\|rAp\|rUp\|2mUp\|rA |
| | | p\|rUp\|rUp\|rGp\|rCp\|rUp\|rUp\|rGp\|rAp\| |
| | | rAp\|rAp\|dTp\|dT] |
| 1319 | UGGAAUUAACAGCAGGUAU | [rUp\|rGp\|rGp\|rAp\|rAp\|rUp\|2mUp\|rAp\|rAp |
| | | \|2mCp\|rAp\|rGp\|2mCp\|rAp\|rGp\|rGp\|2 |
| | | mUp\|rAp\|rUp\|dTp\|dT] |
| 1363 | UAAUUUCUAAAAUAACGGU | [rUp\|rAp\|rAp\|rUp\|rUp\|rUp\|rCp\|2mUp\|rAp |
| | | \|rAp\|rAp\|rAp\|2mUp\|rAp\|rAp\|rCp\|rGp\|r |
| | | Gp\|rUp\|dTp\|dT] |
| 1387 | UAAGUAAUGCUCCACUGGA | [rUp\|rAp\|rAp\|rGp\|2mUp\|rAp\|rAp\|rUp\|rGp |
| | | \|rCp\|rUp\|rCp\|2mCp\|rAp\|rCp\|rUp\|rGp\|r |
| | | Gp\|rAp\|dTp\|dT] |
| 1395 | UUAUCUUUAAGUAAUGCUC | [rUp\|2mUp\|rAp\|rUp\|rCp\|rUp\|rUp\|2mUp\|rA |
| | | p\|rAp\|rGp\|2mUp\|rAp\|rAp\|rUp\|rGp\|rC |
| | | p\|rUp\|rCp\|dTp\|dT] |
| 1397 | UGUAUCUUUAAGUAAUGCU | [rUp\|rGp\|2mUp\|rAp\|rUp\|rCp\|rUp\|rUp\|2mU |
| | | p\|rAp\|rAp\|rGp\|2mUp\|rAp\|rAp\|rUp\|rG |
| | | p\|rCp\|rUp\|dTp\|dT] |
| 1401 | UAUUGAGUAUCUUUAAGUA | [rUp\|rAp\|rUp\|rUp\|rGp\|rAp\|rGp\|2mUp\|rAp |
| | | \|rUp\|rCp\|rUp\|rUp\|2mUp\|rAp\|rAp\|rGp\| |
| | | 2mUp\|rAp\|dTp\|dT] |
| 1405 | UUUCAUUGAGUAUCUUUAA | [rUp\|rUp\|rUp\|2mCp\|rAp\|rUp\|rUp\|rGp\|rAp |
| | | \|rGp\|2mUp\|rAp\|rUp\|rCp\|rUp\|rUp\|2mU |
| | | p\|rAp\|rAp\|dTp\|dT] |
| 1425 | UUUCAGUUUUAUCCCCAAC | [rUp\|rUp\|rUp\|2mCp\|rAp\|rGp\|rUp\|rUp\|rUp |
| | | \|2mUp\|rAp\|rUp\|rCp\|rCp\|rCp\|2mCp\|rA |
| | | p\|rAp\|rCp\|dTp\|dT] |
| 1427 | UAUUCAGUUUUAUCCCCAA | [rUp\|rAp\|rUp\|rUp\|2mCp\|rAp\|rGp\|rUp\|rUp |
| | | \|rUp\|2mUp\|rAp\|rUp\|rCp\|rCp\|rCp\|2mC |
| | | p\|rAp\|rAp\|dTp\|dT] |
| 1449 | UAUUAAAGGGAAGUCAGAA | [rUp\|rAp\|rUp\|2mUp\|rAp\|rAp\|rAp\|rGp\|rGp |
| | | \|rGp\|rAp\|rAp\|rGp\|rUp\|2mCp\|rAp\|rGp\|r |
| | | Ap\|rAp\|dTp\|dT] |
| 1453 | UUUUAUUAAAGGGAAGUCA | [rUp\|rUp\|rUp\|2mUp\|rAp\|rUp\|2mUp\|rAp\|rA |
| | | p\|rAp\|rGp\|rGp\|rGp\|rAp\|rAp\|rGp\|rUp\| |
| | | 2mCp\|rAp\|dTp\|dT] |
| 1455 | UGAAUUUCAUCCUUCCUCU | [rUp\|rGp\|rAp\|rAp\|rUp\|rUp\|rUp\|2mCp\|rAp |
| | | \|rUp\|rCp\|rCp\|rUp\|rUp\|rCp\|rCp\|rUp\|rC |
| | | p\|rUp\|dTp\|dT] |
| 1507 | UCAUAUUGUGCAGAAGGAU | [rUp\|2mCp\|rAp\|2mUp\|rAp\|rUp\|rUp\|rGp\|rU |
| | | p\|rGp\|2mCp\|rAp\|rGp\|rAp\|rAp\|rGp\|rG |
| | | p\|rAp\|rUp\|dTp\|dT] |
| 1525 | UUCAUAAACUCCUGUCCUG | [rUp\|rUp\|2mCp\|rAp\|2mUp\|rAp\|rAp\|rAp\|rC |
| | | p\|rUp\|rCp\|rCp\|rUp\|rGp\|rUp\|rCp\|rCp\|r |
| | | Up\|rGp\|dTp\|dT] |
| 1541 | UAAGAUACAGCAGAGUUCU | [rUp\|rAp\|rAp\|rGp\|rAp\|2mUp\|rAp\|2mCp\|rA |
| | | p\|rGp\|2mCp\|rAp\|rGp\|rAp\|rGp\|rUp\|rU |
| | | p\|rCp\|rUp\|dTp\|dT] |
| 1547 | UAUACAAGAUACAGCAGAG | [rUp\|rAp\|2mUp\|rAp\|2mCp\|rAp\|rAp\|rGp\|rA |
| | | p\|2mUp\|rAp\|2mCp\|rAp\|rGp\|2mCp\|rA |
| | | p\|rGp\|rAp\|rGp\|dTp\|dT] |
| 1657 | UUAGAAAAUCAAGCCAUUC | [rUp\|2mUp\|rAp\|rGp\|rAp\|rAp\|rAp\|rAp\|rUp |
| | | \|2mCp\|rAp\|rAp\|rGp\|rCp\|2mCp\|rAp\|rU |
| | | p\|rUp\|rCp\|dTp\|dT] |
| 1667 | UACUGAAUUUCUCUAGAAA | [rUp\|rAp\|rCp\|rUp\|rGp\|rAp\|rAp\|rUp\|rUp\| |
| | | rUp\|rCp\|rUp\|rCp\|2mUp\|rAp\|rGp\|rAp\|rA |
| | | p\|rAp\|dTp\|dT] |
| 1675 | UAUAAUGUUCACUGAAUUU | [rUp\|rAp\|2mUp\|rAp\|rAp\|rUp\|rGp\|rUp\|rUp |
| | | \|2mCp\|rAp\|rCp\|rUp\|rGp\|rAp\|rAp\|rUp\|r |
| | | Up\|rUp\|dTp\|dT] |
| 1677 | UGAUAAUGUUCACUGAAUU | [rUp\|rGp\|rAp\|2mUp\|rAp\|rAp\|rUp\|rGp\|rUp |
| | | \|rUp\|2mCp\|rAp\|rCp\|rUp\|rGp\|rAp\|rAp\|r |
| | | Up\|rUp\|dTp\|dT] |
| 1679 | UUGAUAAUGUUCACUGAAU | [rUp\|rUp\|rGp\|rAp\|2mUp\|rAp\|rAp\|rUp\|rGp |
| | | \|rUp\|rUp\|2mCp\|rAp\|rCp\|rUp\|rGp\|rAp\|r |
| | | Ap\|rUp\|dTp\|dT] |
| 1723 | UGAGAAAAUGCAGUCAACA | [rUp\|rGp\|rAp\|rGp\|rAp\|rAp\|rAp\|rAp\|rUp\| |
| | | rGp\|2mCp\|rAp\|rGp\|rUp\|2mCp\|rAp\|rAp\| |
| | | 2mCp\|rAp\|dTp\|dT] |
| 1763 | UUUCUUGUACAGUUGGUCU | [rUp\|rUp\|rUp\|rCp\|rUp\|rUp\|rGp\|2mUp\|rAp |
| | | \|2mCp\|rAp\|rGp\|rUp\|rUp\|rGp\|rGp\|rUp\| |
| | | rCp\|rUp\|dTp\|dT] |
| 1767 | UUCUUUCUUCUUGUACAGU | [rUp\|rUp\|rCp\|rUp\|rUp\|rUp\|rCp\|rUp\|rUp\| |
| | | rCp\|rUp\|rUp\|rGp\|2mUp\|rAp\|2mCp\|rAp\|r |
| | | Gp\|rUp\|dTp\|dT] |
| 1769 | UUUCUUUCUUCUUGUACAG | [rUp\|rUp\|rUp\|rCp\|rUp\|rUp\|rUp\|rCp\|rUp\| |
| | | rUp\|rCp\|rUp\|rUp\|rGp\|2mUp\|rAp\|2mCp\| |
| | | rAp\|rGp\|dTp\|dT] |
| 1837 | UUCAUUACUCUCUCUGAGU | [rUp\|rUp\|2mCp\|rAp\|rUp\|2mUp\|rAp\|rCp\|rU |
| | | p\|rCp\|rUp\|rCp\|rUp\|rCp\|rUp\|rGp\|rAp\|r |
| | | Gp\|rUp\|dTp\|dT] |
| 1839 | UUAUCAUUACUCUCUCUGA | [rUp\|2mUp\|rAp\|rUp\|2mCp\|rAp\|rUp\|2mUp\|r |
| | | Ap\|rCp\|rUp\|rCp\|rUp\|rCp\|rUp\|rCp\|ru |
| | | p\|rGp\|rAp\|dTp\|dT] |
| 1843 | UAUUAUCAUUACUCUCUCU | [rUp\|rAp\|rUp\|2mUp\|rAp\|rUp\|2mCp\|rAp\|rU |
| | | p\|2mUp\|rAp\|rCp\|rUp\|rCp\|rUp\|rCp\|rU |
| | | p\|rCp\|rUp\|dTp\|dT] |
| 1869 | UUUAUGUAGGAGCUCUUUC | [rUp\|rUp\|2mUp\|rAp\|rUp\|rGp\|2mUp\|rAp\|rG |
| | | p\|rGp\|rAp\|rGp\|rCp\|rUp\|rCp\|rUp\|rUp\| |
| | | rUp\|rCp\|dTp\|dT] |
| 1887 | UAAUCAAUGCAACUUGUUU | [rUp\|rAp\|rAp\|rUp\|2mCp\|rAp\|rAp\|rUp\|rGp |
| | | \|2mCp\|rAp\|rAp\|rCp\|rUp\|rUp\|rGp\|rUp\|r |
| | | Up\|rUp\|dTp\|dT] |
| 1889 | UUAAUCAAUGCAACUUGUU | [rUp\|2mUp\|rAp\|rAp\|rUp\|2mCp\|rAp\|rAp\|rU |
| | | p\|rGp\|2mCp\|rAp\|rAp\|rCp\|rUp\|rUp\|rG |
| | | p\|rUp\|rUp\|dTp\|dT] |
| 1965 | UUGUGAAAAUGCCAUCCAC | [rUp\|rUp\|rGp\|rUp\|rGp\|rAp\|rAp\|rAp\|rAp\| |
| | | rUp\|rGp\|rCp\|2mCp\|rAp\|rUp\|rCp\|2mCp\|r |
| | | Ap\|rCp\|dTp\|dT] |
| 1991 | UUUAUAUAUAUUGUCUGCA | [rUp\|rUp\|2mUp\|rAp\|2mUp\|rAp\|2mUp\|rAp\|2 |
| | | mUp\|rAp\|rUp\|rUp\|rGp\|rUp\|rCp\|rUp\| |
| | | rGp\|2mCp\|rAp\|dTp\|dT] |
| 2031 | UGAUUAUUUCUGCUGUGUC | [rUp\|rGp\|rAp\|rUp\|2mUp\|rAp\|rUp\|rUp\|rUp |
| | | \|rCp\|rUp\|rGp\|rCp\|rUp\|rGp\|rUp\|rGp\|rU |
| | | p\|rCp\|dTp\|dT] |
| 2109 | UAAUACUCAAGUGUAGCAU | [rUp\|rAp\|rAp\|2mUp\|rAp\|rCp\|rUp\|2mCp\|rA |
| | | p\|rAp\|rGp\|rUp\|rGp\|2mUp\|rAp\|rGp\|2 |
| | | mCp\|rAp\|rUp\|dTp\|dT] |
| 2129 | UUUAAGGAUUUCACAUCUC | [rUp\|rUp\|2mUp\|rAp\|rAp\|rGp\|rGp\|rAp\|rUp |
| | | \|rUp\|rUp\|2mCp\|rAp\|2mCp\|rAp\|rUp\|rC |
| | | p\|rUp\|rCp\|dTp\|dT] |
| 2231 | UCAAAAUCAGGGACUUGUU | [rUp\|2mCp\|rAp\|rAp\|rAp\|rAp\|rUp\|2mCp\|rA |
| | | p\|rGp\|rGp\|rGp\|rAp\|rCp\|rUp\|rUp\|rGp\|r |
| | | Up\|rUp\|dTp\|dT] |
| 2243 | UUAAAGGAAGGUGACAAAA | [rUp\|2mUp\|rAp\|rAp\|rAp\|rGp\|rGp\|rAp\|rAp |
| | | \|rGp\|rGp\|rUp\|rGp\|rAp\|2mCp\|rAp\|rAp\|r |
| | | Ap\|rAp\|dTp\|dT] |
| 2247 | UUUUGGUAAAGGAAGGUGA | [rUp\|rUp\|rUp\|rUp\|rGp\|rGp\|2mUp\|rAp\|rA |
| | | p\|rAp\|rGp\|rGp\|rAp\|rAp\|rGp\|rGp\|rUp\|rG |
| | | p\|rAp\|dTp\|dT] |
| 2255 | UUCUAGUUAUUUGGUAAAG | [rUp\|rUp\|rCp\|2mUp\|rAp\|rGp\|rUp\|2mUp\|rA |
| | | p\|rUp\|rUp\|rUp\|rGp\|rGp\|2mUp\|rAp\|rA |
| | | p\|rAp\|rGp\|dTp\|dT] |
| 2275 | UUUUAAUCCAUAACUCCUU | [rUp\|rUp\|rUp\|2mUp\|rAp\|rAp\|rUp\|rCp\|2m |
| | | Cp\|rAp\|2mUp\|rAp\|rAp\|rCp\|rUp\|rCp\|rC |
| | | p\|rUp\|rUp\|dTp\|dT] |
| 2295 | UCUAGUUUAGCCACAUUUA | [rUp\|rCp\|2mUp\|rAp\|rGp\|rUp\|rUp\|2mUp\|rA |
| | | p\|rGp\|rCp\|2mCp\|rAp\|2mCp\|rAp\|rUp\| |
| | | rUp\|2mUp\|rAp\|dTp\|dT] |
| 2331 | UUAUUAAUCCUUCCAGCUC | [rUp\|2mUp\|rAp\|rUp\|2mUp\|rAp\|rAp\|rUp\|rC |
| | | p\|rCp\|rUp\|rUp\|rCp\|2mCp\|rAp\|rGp\|rC |
| | | p\|rUp\|rCp\|dTp\|dT] |
| 2335 | UUUUCGUAUUUAUUAAUCC | [rUp\|rUp\|rUp\|rUp\|rCp\|rGp\|2mUp\|rAp\|rUp |
| | | \|rUp\|2mUp\|rAp\|rUp\|2mUp\|rAp\|rAp\|rU |
| | | p\|rCp\|rCp\|dTp\|dT] |
| 2357 | UUUUGCAAAAUACUUGAGU | [rUp\|rUp\|rUp\|rUp\|rGp\|2mCp\|rAp\|rAp\|rAp |
| | | \|rAp\|2mUp\|rAp\|rCp\|rUp\|rUp\|rGp\|rAp\|r |
| | | Gp\|rUp\|dTp\|dT] |
| 2361 | UUAACUUUGCAAAAUACUU | [rUp\|2mUp\|rAp\|rAp\|rCp\|rUp\|rUp\|rUp\|rGp |
| | | \|2mCp\|rAp\|rAp\|rAp\|rAp\|2mUp\|rAp\|rC |
| | | p\|rUp\|rUp\|dTp\|dT] |
| 2363 | UCAUAACUUUGCAAAAUAC | [rUp\|2mCp\|rAp\|2mUp\|rAp\|rAp\|rCp\|rUp\|rU |
| | | p\|rUp\|rGp\|2mCp\|rAp\|rAp\|rAp\|rAp\|2m |
| | | Up\|rAp\|rCp\|dTp\|dT] |
| 2449 | UAGUUAUUUUGUACAGUUG | [rUp\|rAp\|rGp\|rUp\|2mUp\|rAp\|rUp\|rUp\|rUp |
| | | \|rUp\|rGp\|2mUp\|rAp\|2mCp\|rAp\|rGp\|rU |
| | | p\|rUp\|rGp\|dTp\|dT] |
| 2503 | UAAUUUUAUGCUCACAUGU | [rUp\|rAp\|rAp\|rUp\|rUp\|rUp\|2mUp\|rAp\|rUp |
| | | \|rGp\|rCp\|rUp\|2mCp\|rAp\|2mCp\|rAp\|rU |
| | | p\|rGp\|rUp\|dTp\|dT] |
| 2505 | UUAAUUUUAUGCUCACAUG | [rUp\|2mUp\|rAp\|rAp\|rUp\|rUp\|rUp\|2mUp\|rA |
| | | p\|rUp\|rGp\|rCp\|rUp\|2mCp\|rAp\|2mCp\| |
| | | rAp\|rUp\|rGp\|dTp\|dT] |
| 2517 | UUAUACCAUGGUCAUAAUU | [rUp\|2mUp\|rAp\|2mUp\|rAp\|rCp\|2mCp\|rAp\|r |
| | | Up\|rGp\|rGp\|rUp\|2mCp\|rAp\|2mUp\|r |
| | | Ap\|rAp\|rUp\|rUp\|dTp\|dT] |
| 2519 | UAUAUACCAUGGUCAUAAU | [rUp\|rAp\|2mUp\|rAp\|2mUp\|rAp\|rCp\|2mCp\|r |
| | | Ap\|rUp\|rGp\|rGp\|rUp\|2mCp\|rAp\|2m |
| | | Up\|rAp\|rAp\|rUp\|dTp\|dT] |
| 2579 | UCUAUUCAAGAGUGUUUAU | [rUp\|rCp\|2mUp\|rAp\|rUp\|rUp\|2mCp\|rAp\|rA |
| | | p\|rGp\|rAp\|rGp\|rUp\|rGp\|rUp\|rUp\|2mU |
| | | p\|rAp\|rUp\|dTp\|dT] |
| 2581 | UUCUAUUCAAGAGUGUUUA | [rUp\|rUp\|rCp\|2mUp\|rAp\|rUp\|rUp\|2mCp\|rA |
| | | p\|rAp\|rGp\|rAp\|rGp\|rUp\|rGp\|rUp\|rUp |
| | | 2mUp\|rAp\|dTp\|dT] |
| 2593 | UUACAAAGUGGAAGUCUAU | [rUp\|2mUp\|rAp\|2mCp\|rAp\|rAp\|rAp\|rGp\|rU |
| | | p\|rGp\|rGp\|rAp\|rAp\|rGp\|rUp\|rCp\|2mU |
| | | p\|rAp\|rUp\|dTp\|dT] |
| 2597 | UAUUACAAAGUGGAAGUCU | [rUp\|rAp\|rUp\|2mUp\|rAp\|2mCp\|rAp\|rAp\|rA |
| | | p\|rGp\|rUp\|rGp\|rGp\|rAp\|rAp\|rGp\|rUp\|r |
| | | Cp\|rUp\|dTp\|dT] |
| 2603 | UCUAAUUACAAAGUGGAAG | [rUp\|rCp\|2mUp\|rAp\|rAp\|rUp\|2mUp\|rAp\|2m |
| | | Cp\|rAp\|rAp\|rAp\|rGp\|rUp\|rGp\|rGp\|rA |
| | | p\|rAp\|rGp\|dTp\|dT] |
| 2655 | UUAUAUUCUGCCACUUAAG | [rUp\|2mUp\|rAp\|2mUp\|rAp\|rUp\|rUp\|rCp\|rU |
| | | p\|rGp\|rCp\|2mCp\|rAp\|rCp\|rUp\|2mUp\| |
| | | rAp\|rAp\|rGp\|dTp\|dT] |
| 2657 | UUUAUAUUCUGCCACUUAA | [rUp\|rUp\|2mUp\|rAp\|2mUp\|rAp\|rUp\|rUp\|rC |
| | | p\|rUp\|rGp\|rCp\|2mCp\|rAp\|rCp\|rUp\|2 |
| | | mUp\|rAp\|rAp\|dTp\|dT] |
| 2687 | UUUAUAUCACCCUCCAAAA | [rUp\|rUp\|2mUp\|rAp\|2mUp\|rAp\|rUp\|2mCp\|r |
| | | Ap\|rCp\|rCp\|rCp\|rUp\|rCp\|2mCp\|rAp\| |
| | | rAp\|rAp\|rAp\|dTp\|dT] |
| 2763 | UUCUUAUGUUCUUGGUGGA | [rUp\|rUp\|rCp\|rUp\|2mUp\|rAp\|rUp\|rGp\|rUp |
| | | \|rUp\|rCp\|rUp\|rUp\|rGp\|rGp\|rUp\|rGp\|rG |
| | | p\|rAp\|dTp\|dT] |
| 2769 | UAAUUCUUAUGUUCUUGGU | [rUp\|rAp\|rAp\|rUp\|rUp\|rCp\|rUp\|2mUp\|rAp |
| | | \|rUp\|rGp\|rUp\|rUp\|rCp\|rUp\|rUp\|rGp\|rG |
| | | p\|rUp\|dTp\|dT] |
| 2783 | UAAAAGCUUGAUAAUUCUA | [rUp\|rAp\|rAp\|rAp\|rAp\|rGp\|rCp\|rUp\|rUp\| |
| | | rGp\|rAp\|2mUp\|rAp\|rAp\|rUp\|rUp\|rCp\|2m |
| | | Up\|rAp\|dTp\|dT] |
| 2845 | UACAAAUAAUUUCAUCCAA | [rUp\|rAp\|2mCp\|rAp\|rAp\|rAp\|2mUp\|rAp\|rA |
| | | p\|rUp\|rUp\|rUp\|2mCp\|rAp\|rUp\|rCp\|2m |
| | | Cp\|rAp\|rAp\|dTp\|dT] |
| 2847 | UAUGACAAAUAAUUUCAUC | [rUp\|rAp\|rUp\|rGp\|rAp\|2mCp\|rAp\|rAp\|rAp |
| | | \|2mUp\|rAp\|rAp\|rUp\|rUp\|rUp\|2mCprA |
| | | p\|rUp\|rCp\|dTp\|dT] |

### Example 7. MSH3 siRNA Screening Data and Knockdown Data for Selected Duplexes

[0398] Various screenings were implemented to determine potential lead siRNA duplex candidates.

[0399] Selected siRNA duplexes targeting human MSH3 were screened in Hela cells at 10 nM and 0.5 nM doses to determine potential lead siRNA candidates. The screening results are provided below in Table 15. The sense and antisense oligonucleotides in Table 15 each include a dTdT overhang on the 3′ end.

[0400] Additionally, every A and G in each sense oligonucleotide in Table 15 is a ribonucleotide. Every C and U in each sense oligonucleotide is a 2′-O-Methyl ribonucleotide.

[0401] Also, every A and Gin each antisense oligonucleotide in Table 15 is a ribonucleotide. Every C and U preceding an A in the antisense oligonucleotide is a 2′-O-Methyl ribonucleotide, with one exception: U is the first nucleotide of the antisense strand, and it is a ribonucleotide.

[0402] Each nucleotide in the sense and antisense oligonucleotide in Table 15 is linked by a phosphate.

TABLE 15

| | SEQ ID | | SEQ ID NO./ |
|---|---|---|---|
| | NO./Sense | | Antisense |
| Sense | No. | antisense | No. |
| GCCAAAAUGUACUGAUUUA | 156 | UAAAUCAGUACAUUUUGGC | 157 |
| GUGGAAUGUGGAUAUAAGA | 358 | UCUUAUAUCCACAUUCCAC | 359 |
| GAUAUAAGUAUAGAUUCUA | 374 | UAGAAUCUAUACUUAUAUC | 375 |
| GCCAUUUAGAUCACAACUA | 412 | UAGUUGUGAUCUAAAUGGC | 413 |
| CGAGGUUGUGUUUGAUAGA | 716 | UCUAUCAAACACAACCUCG | 717 |
| UGAAUACAGCCAUGCUUUA | 832 | UAAAGCAUGGCUGUAUUCA | 833 |
| CUGGCAUUGUUAACUUAGA | 906 | UCUAAGUUAACAAUGCCAG | 907 |
| CUCCAAACCUGAGAAUUUA | 968 | UAAAUUCUCAGGUUUGGAG | 969 |
| UGGGUUUUAGACCACACUA | 1084 | UAGUGUGGUCUAAAACCCA | 1085 |
| GGUUUUAGACCACACUAAA | 1086 | UUUAGUGUGGUCUAAAACC | 1087 |
| GACGGAAGUUAAAGAAGUA | 1114 | UACUUCUUUAACUUCCGUC | 1115 |
| CUCCAUUCAGAAUCUAGUA | 1186 | UACUAGAUUCUGAAUGGAG | 1187 |
| CCGUUAUUUUAGAAAUUCA | 1364 | UGAAUUUCUAAAAUAACGG | 1365 |
| CGUUAUUUUAGAAAUUCCA | 1366 | UGGAAUUUCUAAAAUAACG | 1367 |
| GGAGCAUUACUUAAAGAUA | 1392 | UAUCUUUAAGUAAUGCUCC | 1393 |
| AGCUAGUCCUUGACUGCAA | 1642 | UUGCAGUCAAGGACUAGCU | 1643 |
| GCUCCUACAUAAAACAAGA | 1874 | UCUUGUUUUAUGUAGGAGC | 1875 |
| GGGUGCUGCAGACAAUAUA | 1982 | UAUAUUGUCUGCAGCACCC | 1983 |
| GACAAUAUAUAUAAAGGAA | 1992 | UUCCUUUAUAUAUAUUGUC | 1993 |
| GUGGCUAAACUAGCAGAUA | 2302 | UAUCUGCUAGUUUAGCCAC | 2303 |
| GAAGGAUUAAUAAAUACGA | 2332 | UCGUAUUUAUUAAUCCUUC | 2333 |
| GGACGAUGCAUAAUGCACA | 2386 | UGUGCAUUAUGCAUCGUCC | 2387 |
| CUGUCUUCCUAACUUUUCA | 2550 | UGAAAAGUUAGGAAGACAG | 2551 |
| CCAGUAAAGCCUUAAGUGA | 2642 | UCACUUAAGGCUUUACUGG | 2643 |

[0403] Based on the results of Table 15, the following siRNA duplex candidates were selected for further testing and characterization.
[0404] dsRNA duplex of SENSE OLIGO NO: 156/ANTISENSE OLIGO: 157
[0405] dsRNA duplex of SENSE OLIGO NO: 906/ANTISENSE OLIGO NO: 907
[0406] dsRNA duplex of SENSE OLIGO NO: 968/ANTISENSE OLIGO NO: 1969
[0407] dsRNA duplex of SENSE OLIGO NO: 1392/ANTISENSE OLIGO NO: 1393
[0408] dsRNA duplex of SENSE OLIGO NO: 1366/ANTISENSE OLIGO NO: 1367
[0409] dsRNA duplex of SENSE OLIGO NO: 1874/ANTISENSE OLIGO NO: 1875

[0410] The dose response curves for the selected candidates are shown in FIGS. 1-6. The IC₂₀, IC₅₀, and IC₅₀ values for the candidates are shown below in Table 16. The sense and antisense oligonucleotides of Table 16 each contain a dTdT overhang on the 3′ end. Additionally, every A and Gin each sense oligonucleotide in Table 16 is a ribonucleotide. Every C and U in each sense oligonucleotide is a 2′-O-Methyl ribonucleotide.

[0411] Also, every A and G in each antisense oligonucleotide in Table 16 is a ribonucleotide. Every C and U preceding an A in the antisense oligonucleotide is a 2′-O-Methyl ribonucleotide, with one exception: U is the first nucleotide of the antisense strand, and it is a ribonucleotide.

[0412] Each nucleotide in the sense and antisense oligonucleotide in Table 16 is linked by a phosphate.

TABLE 16

| | | SEQ ID No. | | | |
|---|---|---|---|---|---|
| | | Sense | | | |
| | | No./ | | | |
| | | Antisense | IC₂₀ @ | IC₅₀ @ | IC₈₀ @ |
| Sense | Antisense | No. | [nM] | [nM] | [nM] |
| CUGGCAUUGUUAACUUAGA | UCUAAGUUAACAAUGCCAG | 968/969 | 0.0016 | 0.0081 | #N/A |
| GGAGCAUUACUUAAAGAUA | UAUCUUUAAGUAAUGCUCC | 1392/1393 | 0.0037 | 0.0213 | 1.1670 |
| CUCCAAACCUGAGAAUUUA | UAAAUUCUCAGGUUUGGAG | 1084/1085 | 0.0008 | 0.0172 | #N/A |
| CGUUAUUUUAGAAAUUCCA | UGGAAUUUCUAAAAUAACG | 1366/1367 | 0.0049 | 0.0343 | #N/A |
| GCCAAAAUGUACUGAUUUA | UAAAUCAGUACAUUUUGGC | 156/157 | 0.0040 | 0.0196 | #N/A |
| GCUCCUACAUAAAACAAGA | UCUUGUUUUAUGUAGGAGC | 1874/1875 | 0.0173 | 0.1013 | #N/A |

### RNAi Dose Response Screen

[0413] Twelve siRNA duplexes targeting MSH3 were tested using a Hela cell-based assay. The siRNA duplex strands and the EC₅₀ results are provided below in Table 17. The sense and antisense oligonucleotides of Table 18 each contain a dTdT overhang on the 3′ end. Additionally, every A and Gin each sense oligonucleotide in Table 17 is a ribonucleotide. Every C and U in each sense oligonucleotide is a 2′-O-Methyl ribonucleotide.

[0414] Also, every A and G in each antisense oligonucleotide in Table 17 is a ribonucleotide. Every C and U preceding an A in the antisense oligonucleotide is a 2′-O-Methyl ribonucleotide, with one exception: U is the first nucleotide of the antisense strand, and it is a ribonucleotide.

[0415] Each nucleotide in the sense and antisense oligonucleotide in Table 17 is linked by a phosphate.

[0416] The non linear regression curves depicting the mean, the standard deviation, and the RQ values for each of the tested siRNAs at ten concentrations are plotted together in FIG. 7.

TABLE 17

| | | SEQ ID | |
|---|---|---|---|
| | | NO. | |
| | | Sense | |
| | | No./ | |
| | | Anti- | |
| | | sense | EC50 |
| Sense | Antisense | No. | (pM) |
| AUACAAGUCAUGAAAAUUA | UAAUUUUCAUGACUUGUAU | 258/259 | 41.09 |
| CGCUAGAAUUACAAUACAA | UUGUAUUGUAAUUCUAGCG | 310/311 | 129.2 |
| UAGAAUUACAAUACAUAGA | UCUAUGUAUUGUAAUUCUA | 312/313 | 120 |
| AGCCCGAGAGCUCAAUAUA | UAUAUUGAGCUCUCGGGCU | 388/389 | 109.9 |
| GCCCGAGAGCUCAAUAUUA | UAAUAUUGAGCUCUCGGGC | 390/391 | 179.9 |
| CGAGAGCUCAAUAUUUAUA | UAUAAAUAUUGAGCUCUCG | 392/393 | 18.49 |
| GAGAGCUCAAUAUUUAUUA | UAAUAAAUAUUGAGCUCUC | 394/395 | 191.7 |
| UUUAUUGCCAUUUAGAUCA | UGAUCUAAAUGGCAAUAAA | 402/403 | 184.4 |
| AGAUCACAACUUUAUGACA | UGUCAUAAAGUUGUGAUCU | 420/421 | 374.3 |
| CACAGACUGUUUGUUCAUA | UAUGAACAAACAGUCUGUG | 460/461 | 176.4 |
| UCACCUAAAGUCAGAAUUA | UAAUUCUGACUUUAGGUGA | 1302/1303 | 74.96 |
| CAGAGAGAGUAAUGAUAAA | UUUAUCAUUACUCUCUCUG | 1840/1841 | 30.16 |

[0417] The 108 siRNA duplexes selected for dose response validation had new source plates created to allow each dose to be diluted 1000-fold in the final assay plate. The final siRNA concentrations in the assay plates were as follows:
[0418] 100 nM
[0419] 16.67 nM
[0420] 2.77 nM
[0421] 462 pM
[0422] 77.1 pM
[0423] 12.9 pM
[0424] 2.14 pM
[0425] 357 fM
[0426] 59.5 fM
[0427] UltraPure H2O Control

[0428] After this initial dispense the RNAi screen protocol was followed. The screening results for the top four candidates are provided in FIGS. 8A-8D.

### Example 8: Confirmatory Screen of Top Sequences in Primary Human Hepatocytes (PHH)

[0429] Primary Human Hepatocytes (PHH) were used to select potent siRNAs targeting the human MSH3 transcript for further in vivo testing. The siRNAs used in this study were selected from in vitro activity screens. Twenty MSH3 siRNA from the primary screens were screened by transient transfection at 0.1 nM and 2 nM in PHH. The eight siRNAs that showed significant KD (>75% at 2 nM) activity were further evaluated by dose response curves (DRC) in PHH. A mouse/cyno/human cross-reactive siRNA (SENSE OLIGO NO. 832/ANTISENSE OLIGO NO. 833) with known MSH3 knockdown activity in mouse was included as a reference.

Testing Top Eight siRNAs for DRCs by Transient Transfection in PHH

[0430] PHH cat. #Hu8350 were obtained from (Thermo Scientific; Cambridge, MA, USA). Cells were plated at 35K per well in Hepatocyte plating media cat. #CM3000 and maintained in Hepatocyte maintenance media cat. #CM4000 (Thermo Scientific; Cambridge, MA, USA) in a 96 well collagen coated plate cat. #12-565-909 (Fisher Scientific; Cambridge, MA, USA) and incubated at 37° C. with 5% CO2 in a humidified incubator for each experiment.

### Transfection

[0431] Five to six hours post plating, the cells were washed with maintenance media and incubated at 37° C. Twenty-four hours post-thaw, siRNAs were diluted starting at 100 nM with a 4-fold dilution to 0.000154 nM, complexed with 0.3 μl of RNAi Max cat. #13-778-150 (Fisher Scientific; Cambridge, MA, USA) and added to cells. Twenty-four hours post transfection, RNA was extracted using Quick-RNA 96 kit cat. #R1053 (Zymo Research; Irvine, CA, USA) according to manufacturer's instructions and samples were eluted in 22 μl nuclease-free water. Total RNA was quantified using Quant-iT RiboGreen RNA assay kit cat. #R11490 (Invitrogen; Carlsbad, CA, USA) and 80 ngs was used to generate cDNA with SuperScript IV VILO Master Mix cat. #11-756-500 (Thermo Scientific; Cambridge, MA, USA) according to manufacturer's instructions. The RNA was treated with DNAse I to remove any genomic DNA during RNA extraction and any remainder of it was accounted for with the addition of a cDNA reaction lacking reverse transcriptase (−RT control). 10% of the cDNA reaction was used for qPCR using PrimeTime Gene Expression Master Mix cat. #1055772 (Integrated DNA Technologies (IDT); Coralville, IA, USA) along with the hydrolysis probes for the gene of interest and housekeeper GUSB or TBP (IDT; Coralville, IA, USA) on a LightCycler 480 II (Roche; Basel, Switzerland).

### Data Analysis

[0432] The GUSB and TBP genes were used as housekeeping controls. The signal threshold for target MSH3 was set based on background signal from −RT control samples and crossing point (Cp) determined for each probe and sample. ΔCp was calculated as Cp[target]−Cp[housekeeping]. The average ΔCp for Mock treated samples was established for each target gene. The ΔΔCp was calculated as the ΔCp−Average [Mock] ΔCp, and relative expression as 2\hat{ }−(ΔΔCp). Relative fold-change in target expression calculated by 2−ΔΔCp, was averaged between the two housekeepers and analyzed in GraphPad Prism. For generating DRCs, the concentration of each treatment was converted to the Log values, IC50 for each target was calculated by analyzing the relative expression using the equation for “Non-linear regression curve fit” with Prism. The equation was fit to Log (Inhibitor) Vs response-variable slope using (Four parameters).

### DRCs and IC₅₀ Graphs

[0433] The siRNAs with highest activity in the dual-dose screen were used to generate the dose response curves. The graphs in FIGS. 9A-9I shows IC₅₀ analysis for the target knock down measured by qPCR. The X-axis represents the concentration of siRNA transfected and the Y-axis represents the relative MSH3 target remaining. The IC₅₀ for each target was calculated using the equation for “Non-linear regression curve fit” with Prism. The equation was fit to Log (Inhibitor) Vs response-variable slope using (Four parameters).

[0434] FIGS. 9A-9I show that there was good transfection efficiency between plates by the control MSH3 siRNA knock down in different plates. The DRCs for siRNA knock down were generated in four different plates. A commercially available SMART pool MSH3 siRNA was used to compare the transfection efficiency between different plates at 2 nM. The X-axis represents the concentration of siRNA transfection on different plates and Y-axis represents the percentage of target remaining. The fold change in MSH3 expression from the four plates is shown in FIG. 10. The siRNAs in each plate are provided in Table 18. The IC₅₀ with R² values and max KD for the top eight siRNAs are shown in Table 19.

[0435] The sense and antisense oligonucleotides of Tables 18 and 19 each contain a dTdT overhang on the 3′ end. Additionally, every A and G in each sense oligonucleotide in Tables 18 and 19 is a ribonucleotide. Every C and U in each sense oligonucleotide is a 2′-O-Methyl ribonucleotide.

[0436] Also, every A and Gin each antisense oligonucleotide in Tables 18 and 19 is a ribonucleotide. Every C and U preceding an A in the antisense oligonucleotide is a 2′-O-Methyl ribonucleotide, with one exception: U is the first nucleotide of the antisense strand, and it is a ribonucleotide.

[0437] Each nucleotide in the sense and antisense oligonucleotide in Tables 18 and 19 is linked by a phosphate.

TABLE 18

| | | Seq id/ | | Seq id/ |
|---|---|---|---|---|
| | | SENSE | | ANTISENSE |
| | | OLIGO | | OLIGO |
| Plates | Sense | NO | Antisense | NO |
| Plate 1 | CGUUAUUUUA | 1366 | UGGAAUUUCU | 1367 |
| | GAAAUUCCA | | AAAAUAACG | |
| Plate 1 | GCUCCUACAU | 1874 | UCUUGUUUUA | 1875 |
| | AAAACAAGA | | UGUAGGAGC | |
| Plate 2 | CAACAGAAGU | 550 | UAAGAGUGAA | 551 |
| | UCACUCUUA | | CUUCUGUUG | |
| Plate 2 | UCACCUAAAG | 1302 | UAAUUCUGAC | 1303 |
| | UCAGAAUUA | | UUUAGGUGA | |
| Plate 3 | AGCCCGAGAG | 388 | UAUAUUGAGC | 389 |
| | CUCAAUAUA | | UCUCGGGCU | |
| Plate 3 | UUUAUUGCCA | 402 | UGAUCUAAAU | 403 |
| | UUUAGAUCA | | GGCAAUAAA | |
| Plate 4 | GUUGAUGAGA | 7450 | UAGUCAUUAU | 745 |
| | UAAUGACUA | | CUCAUCAAC | |
| Plate 4 | AGAUAAUGAC | 656 | UAAGUAUCAG | 657 |
| | UGAUACUUA | | UCAUUAUCU | |

TABLE 19

| | | SEQ ID | | | | |
|---|---|---|---|---|---|---|
| | | NO. | | | | |
| | | Sense | | | | |
| | | No./ | | | | |
| | | Anti- | | | Max | |
| | | sense | IC50 | | KD | Rank- |
| Sense | Antisense | No. | [nM] | R² | (%) | ing |
| GUUGAUGAGA | UAGUCAUUAU | 648/ | 0.003 | 0.95 | 88 | 1 |
| UAAUGACUA | CUCAUCAAC | 649 | | | | |
| AGAUAAUGAC | UAAGUAUCAG | 656/ | 0.007 | 0.84 | 80 | 2 |
| UGAUACUUA | UCAUUAUCU | 657 | | | | |
| UGAAUACAGC | UAAAGCAUGG | 832/ | 0.006498 | 0.92 | 80 | 3 |
| CAUGCUUUA | CUGUAUUCA | 833 | | | | |
| AGAUCACAAC | UGUCAUAAAG | 420/ | 0.007 | 0.78 | 72 | 4 |
| UUUAUGACA | UUGUGAUCU | 421 | | | | |
| CGUUAUUUUA | UGGAAUUUCU | 1366/ | 0.009 | 0.92 | 80 | 5 |
| GAAAUUCCA | AAAAUAACG | 1367 | | | | |
| UCACCUAAAG | UAAUUCUGAC | 1302/ | 0.009 | 0.93 | 83 | 6 |
| UCAGAAUUA | UUUAGGUGA | 1303 | | | | |
| CAACAGAAGU | UAAGAGUGAA | 550/ | 0.013 | 0.85 | 75 | 7 |
| UCACUCUUA | CUUCUGUUG | 551 | | | | |
| ACUUCUACCA | UAAGAUAGCU | 672/ | 0.015 | 0.86 | 69 | 8 |
| GCUAUCUUA | GGUAGAAGU | 673 | | | | |
| GCUCCUACAU | UCUUGUUUUA | 1874/ | 0.087 | 0.92 | 79 | 9 |
| AAAACAAGA | UGUAGGAGC | 1875 | | | | |

[0438] This study identified eight siRNAs targeting MSH3 with half maximal inhibitory concentration (IC₅₀) by transfection in PHH in the low pM range. The results of the eight candidates selected from the siRNA screening at 0.5 nM and 10 nM doses and the resulting IC₅₀ are provided below in Table 20. The siRNA of Sense No. 656/Antisense No. 657 was used as a control.

TABLE 20
dsRNA

| SENSE OLIGO No./ | % target remaining | | |
|---|---|---|---|
| ANTISENSE OLIGO No. | 0.5 nM | 10 nM | IC₅₀ (nM) |
| SENSE OLIGO No. 832/ | 44.7735672 | 23.0173288 | N/A |
| ANTISENSE OLIGO No. | | | |
| 833 | | | |
| SENSE OLIGO No. 1366/ | 27.0833733 | 17.2481438 | 34.349054 |
| ANTISENSE OLIGO No. | | | |
| 1367 | | | |
| SENSE OLIGO No. 1874/ | 28.0472485 | 23.0624968 | 101.305208 |
| ANTISENSE OLIGO No. | | | |
| 1875 | | | |
| SENSE OLIGO No. 550/ | 34.4598214 | 24.5834182 | 18.49 |
| ANTISENSE OLIGO No. | | | |
| 551 | | | |
| SENSE OLIGO No. 1302/ | 36.1222642 | 25.7249608 | 74.96 |
| ANTISENSE OLIGO No. | | | |
| 1303 | | | |
| SENSE OLIGO No. 420/ | 37.1536281 | 25.4957144 | 109.9 |
| ANTISENSE OLIGO No. | | | |
| 421 | | | |
| SENSE OLIGO No. 672/ | 33.8159421 | 24.8627536 | 184.4 |
| ANTISENSE OLIGO No. | | | |
| 673 | | | |
| SENSE OLIGO No. 648/ | N/A | 16.9266119 | N/A |
| ANTISENSE OLIGO No. | | | |
| 649 | | | |
| SENSE OLIGO No. 656/ | N/A | 22.5483683 | N/A |
| ANTISENSE OLIGO No. | | | |
| 657 | | | |

[0439] This example demonstrates that the siRNAs targeting MSH3 identified in the screening studies showed confirmed MSH3 knockdown in vitro.

### OTHER ASPECTS

[0440] All publications, patents, and patent applications mentioned in this specification are incorporated herein by reference in their entirety to the same extent as if each individual publication, patent, or patent application was specifically and individually indicated to be incorporated by reference in its entirety. Where a term in the present application is found to be defined differently in a document incorporated herein by reference, the definition provided herein is to serve as the definition for the term.

[0441] While the invention has been described in connection with specific aspects thereof, it will be understood that invention is capable of further modifications and this application is intended to cover any variations, uses, or adaptations following, in general, the principles and including such departures from the present disclosure that come within known or customary practice within the art to which the invention pertains and can be applied to the essential features hereinbefore set forth, and follows in the scope of the claimed.

[0442] In addition to the various aspects described herein, the present disclosure includes the following aspects numbered E1 through E108. This list of aspects is presented as an exemplary list and the application is not limited to these particular aspects.
[0443] E1. A double-stranded ribonucleic acid (dsRNA), wherein the dsRNA comprises a sense strand and an antisense strand, wherein the antisense strand is complementary to at least 15 contiguous nucleobases of an MSH3 gene, and wherein the dsRNA comprises a duplex structure of between 15 and 30 linked nucleosides in length.
[0444] E2. A dsRNA for reducing expression of MSH3 in a cell, wherein the dsRNA comprises a sense strand and an antisense strand, wherein the antisense strand is complementary to at least 15 contiguous nucleobases of an MSH3 gene, and wherein the dsRNA comprises a duplex structure of between 15 and 30 linked nucleosides in length.
[0445] E3. The dsRNA of E1 or E2 comprising a duplex structure of between 19 and 23 linked nucleosides in length.
[0446] E4. The dsRNA of any one of E1-E3, further comprising a loop region joining the sense strand and antisense strand, wherein the loop region is characterized by a lack of base pairing between nucleobases within the loop region.
[0447] E5. The dsRNA of any one of E1-E4, wherein the region the sense or antisense strand is complementary to is at least 15 contiguous nucleotides of an MSH3 gene corresponding to a sequence of reference mRNA NM_002439.4 at one or more of positions 566-589, 678-701, 875-989, 1019-1088, 1370-1393, 1466-1569, 1721-1849, 1879-2038, 2086-2171, 2783-2806, 2847-2922, 3043-3119, 3241-3314, 3330-3353, or 3701-3792 of the MSH3 gene.
[0448] E6. The dsRNA of any one of E1-E4, wherein the region the sense or antisense strand is complementary to is at least 15 contiguous nucleotides of an MSH3 gene corresponding to a sequence of reference mRNA NM_002439.4 at one or more of positions 876-989, 1019-1088, 1370-1393, 1889-1938, or 3241-3314 of the MSH3 gene.
[0449] E7. The dsRNA of any one of E1-E4, wherein the region the sense or antisense strand is complementary to is at least 15 contiguous nucleotides of an MSH3 gene corresponding to a sequence of reference mRNA NM_002439.4 at one or more of positions 876-989, 1019-1088, 1370-1393, 1466-1569, 1756-1849, 1879-2038, 2086-2171, 2783-2806, 2847-2922, 3043-3119, 3241-3314, 3330-3353, or 3701-3792 of the MSH3 gene.
[0450] E8. The dsRNA of any one of E1-E4, wherein the region the sense or antisense strand is complementary to is at least 15 contiguous nucleotides of an MSH3 gene corresponding to a sequence of reference mRNA NM_002439.4 at one or more of positions 678-701, 875-989, 1019-1088, 1370-1393, 1466-1569, 1721-1849, 1879-2038, 2086-2171, 2783-2806, 2847-2922, 3043-3119, 3241-3314, 3330-3353, and 3701-3792 of the MSH3 gene.
[0451] E9. The dsRNA of any one of E1-E4, wherein the region the sense or antisense strand is complementary to is at least 15 contiguous nucleotides of an MSH3 gene corresponding to a sequence of reference mRNA NM_002439.4 at positions 879-921 of the MSH3 gene.
[0452] E10. The dsRNA of any one of E1-E4, wherein the region the sense or antisense strand is complementary to is at least 15 contiguous nucleotides of an MSH3 gene corresponding to a sequence of reference mRNA NM_002439.4 at one or more of positions 875-989, 1019-1088, 1370-1393, 1466-1569, 1721-1849, 1879-1970, 2783-2806, 2847-2922, 3043-3119, 3241-3314, 3330-3353, or 3703-3792 of the MSH3 gene.
[0453] E11. The dsRNA of any one of E1-E4, wherein the region the sense or antisense strand is complementary to is at least 15 contiguous nucleotides of an MSH3 gene corresponding to a sequence of reference mRNA NM_002439.4 at one or more of positions 566-589, 678-701, 875-989, 1019-1088, 1370-1393, 1466-1569, 1721-1849, 1879-2038, 2086-2171, 2783-2806, 2847-2922, 3043-3119, 3241-3314, 3330-3353, or 3701-3792 of the MSH3 gene.
[0454] E12. The dsRNA of any one of E1-E4, wherein the antisense strand comprises an antisense nucleobase sequence selected from Table 3, wherein the 5′ nucleotide represented by U can be any nucleotide (e.g., U, A, C, G), and the sense strand comprises a sense nucleobase sequence complementary to the antisense nucleobase sequence.
[0455] E13. The dsRNA of any one of E1-E4, wherein the antisense nucleobase sequence consists of an antisense strand in Table 3, wherein the 5′ nucleotide represented by U can be any nucleotide (e.g., U, A, C, G), and the sense nucleobase sequence consists of a sequence complementary to the antisense nucleobase sequence.
[0456] E14. The dsRNA of any one of E1-E4, wherein the sense strand comprises a sense nucleobase sequence selected from Table 3, and the antisense strand comprises an antisense nucleobase sequence complementary to the sense nucleobase sequence.
[0457] E15. The dsRNA of any one of E1-E4, wherein the sense nucleobase sequence consists of a sense strand in Table 3, and the antisense nucleobase sequence consists of a sequence complementary to the sense nucleobase sequence.
[0458] E16. The dsRNA of any one of E1-E4, wherein the sense strand comprises a sense nucleobase sequence selected from Tables 4-10, and the antisense strand comprises an antisense nucleobase sequence complementary to the sense nucleobase sequence.
[0459] E17. The dsRNA of any one of E1-E4, wherein the sense nucleobase sequence consists of a sense strand in any one of Tables 4-10, and the antisense nucleobase sequence consists of a sequence complementary to the sense nucleobase sequence.
[0460] E18. The dsRNA of any one of E1-E4, wherein the antisense strand comprises an antisense nucleobase sequence selected from Table 11, wherein the 5′ nucleotide represented by U can be any nucleotide (e.g., U, A, C, G), and the sense strand comprises a sense nucleobase sequence complementary to the antisense nucleobase sequence.
[0461] E19. The dsRNA of any one of E1-E4, wherein the antisense nucleobase sequence consists of an antisense strand in Table 11, wherein the 5′ nucleotide represented by U can be any nucleotide (e.g., U, A, C, G), and the sense nucleobase sequence consists of a sequence complementary to the antisense nucleobase sequence
[0462] E20. The dsRNA of any one of E1-E4, wherein the sense strand comprises a sense nucleobase sequence selected from Table 11, and the antisense strand comprises an antisense nucleobase sequence complementary to the sense nucleobase sequence.
[0463] E21. The dsRNA of any one of E1-E4, wherein the sense nucleobase sequence consists of a sense strand in Table 11, and the antisense nucleobase sequence consists of a sequence complementary to the sense nucleobase sequence.
[0464] E22. The dsRNA of any one of E1-E21, wherein the dsRNA comprises at least one alternative nucleobase, at least one alternative internucleoside linkage, and/or at least one alternative sugar moiety.
[0465] E23. The dsRNA of E22, wherein at least one alternative internucleoside linkage is a phosphorothioate internucleoside linkage.
[0466] E24. The dsRNA of E22, wherein at least one alternative internucleoside linkage is a 2′-alkoxy internucleoside linkage.
[0467] E25. The dsRNA of E22, wherein at least one alternative internucleoside linkage is an alkyl phosphate internucleoside linkage.
[0468] E26. The dsRNA of E22, wherein at least one alternative nucleobase is 5′-methylcytosine, pseudouridine, or 5-methoxyuridine.
[0469] E27. The dsRNA of E22, wherein at least one alternative sugar moiety is 2′-OMe or a bicyclic nucleic acid.
[0470] E28. The dsRNA of E22, wherein the dsRNA comprises at least one 2′-OMe sugar moiety and at least one phosphorothioate internucleoside linkage.
[0471] E29. The dsRNA of any one of E1-E28, wherein the dsRNA further comprises a ligand conjugated to the 3′ end of the sense strand through a monovalent or branched bivalent or trivalent linker.
[0472] E30. The dsRNA of any one of E1-E29, wherein the sense strand comprises a nucleobase sequence of any one of SEQ ID NOs: 140, 156, 234, 240, 246, 380, 382, 386, 388, 396, 406, 418, 464, 478, 520, 540, 564, 568, 750, 822, 830, 844, 868, 870, 874, 904, 1042, 1060, 1062, 1064, 1068, 1090, 1096, 1098, 1114, 1116, 1166, 1168, 1170, 1182, 1192, 1212, 1214, 1216, 1222, 1244, 1258, 1292, 1358, 1360, 1374, 1378, 1380, 1400, 1866, 1868, 1870, 1882, 1892, 1926, 1946, 1964, 1970, 2084, 2088, 2090, 2094, 2124, 2130, 2146, 2264, 2290, 2308, 2318, 2324, 2606, 2608, 2610, 2632, 2652, 2678, or 2690.
[0473] E31. The dsRNA of any one of E1-E29, wherein the sense strand comprises a nucleobase sequence of any one of SEQ ID NOs: 380, 382, 386, 388, 396, 406, 418, 464, 478, 520, 540, 564, 568, 750, 1166, 1168, 1170, 1182, 1192, 1212, 1214, 1216, 1222, 2264, 2290, 2308, or 2318.
[0474] E32. The dsRNA of any one of E1-E29, wherein the sense strand comprises a nucleobase sequence of any one of SEQ ID NOs: 380, 382, 386, 388, 396, 406, 418, 464, 478, 520, 540, 564, 568, 750, 822, 830, 844, 868, 870, 874, 904, 1060, 1062, 1064, 1068, 1090, 1096, 1098, 1114, 1116, 1166, 1168, 1170, 1182, 1192, 1212, 1214, 1216, 1222, 1244, 1258, 1292, 1358, 1360, 1374, 1378, 1380, 1400, 1866, 1868, 1870, 1882, 1892, 1926, 1946, 1964, 1970, 2084, 2088, 2090, 2094, 2124, 2130, 2146, 2264, 2290, 2308, 2318, 2324, 2606, 2608, 2610, 2632, 2652, 2678, or 2690.
[0475] E33. The dsRNA of any one of E1-E29, wherein the sense strand comprises a nucleobase sequence of any one of SEQ ID NOs: 234, 240, 246, 380, 382, 386, 388, 396, 406, 418, 464, 478, 520, 540, 564, 568, 750, 822, 830, 844, 868, 870, 874, 904, 1042, 1060, 1062, 1064, 1068, 1090, 1096, 1098, 1114, 1116, 1166, 1168, 1170, 1182, 1192, 1212, 1214, 1216, 1222, 1244, 1258, 1292, 1358, 1360, 1374, 1378, 1380, 1400, 1866, 1868, 1870, 1882, 1892, 1926, 1946, 1964, 1970, 2084, 2088, 2090, 2094, 2124, 2130, 2146, 2264, 2290, 2308, 2318, 2324, 2606, 2608, 2610, 2632, 2652, 2678, or 2690.
[0476] E34. The dsRNA of any one of E1-E29, wherein the sense strand comprises a nucleobase sequence of any one of SEQ ID NOs: 380, 382, 386, 388, 396, 406, 418, 464, 478, 520, 540, 564, 568, 750, 822, 830, 844, 868, 870, 874, 904, 1042, 1060, 1062, 1064, 1068, 1090, 1096, 1098, 1114, 1116, 1166, 1168, 1170, 1182, 1192, 1212, 1214, 1216, 1222, 1244, 1866, 1868, 1870, 1926, 1946, 1964, 1970, 2084, 2088, 2090, 2094, 2124, 2130, 2146, 2264, 2290, 2308, 2318, 2324, 2606, 2608, 2610, 2632, 2652, 2678, or 2690.
[0477] E35. The dsRNA of any one of E1-E29, wherein the sense strand comprises a nucleobase sequence of any one of SEQ ID NOs: 140, 156, 234, 240, 246, 380, 382, 386, 388, 396, 406, 418, 464, 478, 520, 540, 564, 568, 750, 822, 830, 844, 868, 870, 874, 904, 1042, 1060, 1062, 1064, 1068, 1090, 1096, 1098, 1114, 1116, 1166, 1168, 1170, 1182, 1192, 1212, 1214, 1216, 1222, 1244, 1258, 1292, 1358, 1360, 1374, 1378, 1380, 1400, 1866, 1868, 1870, 1882, 1892, 1926, 1946, 1964, 1970, 2084, 2088, 2090, 2094, 2124, 2130, 2146, 2264, 2290, 2308, 2318, 2324, 2606, 2608, 2610, 2632, 2652, 2678, or 2690.
[0478] E36. The dsRNA of any one of E1-E29, wherein the antisense strand comprises a nucleobase sequence of any one of SEQ ID NOs: 141, 157, 235, 241, 247, 381, 383, 387, 389, 397, 407, 419, 465, 479, 521, 541, 565, 569, 751, 823, 831, 845, 869, 871, 875, 905, 1043, 1061, 1063, 1065, 1069, 1091, 1097, 1099, 1115, 1117, 1167, 1169, 1171, 1183, 1193, 1213, 1215, 1217, 1223, 1245, 1259, 1293, 1359, 1361, 1375, 1379, 1381, 1401, 1867, 1869, 1871, 1883, 1893, 1927, 1947, 1965, 1971, 2085, 2089, 2091, 2095, 2125, 2131, 2147, 2265, 2291, 2309, 2319, 2325, 2607, 2609, 2611, 2633, 2653, 2679, or 2691, wherein the 5′ nucleotide represented by U can be any nucleotide (e.g., U, A, C, G).
[0479] E37. The dsRNA of any one of E1-E29, wherein the antisense strand comprises a nucleobase sequence of any one of SEQ ID NOs: 381, 383, 387, 389, 397, 407, 419, 465, 479, 521, 541, 565, 569, 751, 1167, 1169, 1171, 1183, 1193, 1213, 1215, 1217, 1223, 2265, 2291, 2309, or 2319, wherein the 5′ nucleotide represented by U can be any nucleotide (e.g., U, A, C, G).
[0480] E38. The dsRNA of any one of E1-E29, wherein the antisense strand comprises a nucleobase sequence of any one of SEQ ID NOs: 381, 383, 387, 389, 397, 407, 419, 465, 479, 521, 541, 565, 569, 751, 823, 831, 845, 869, 871, 875, 905, 1061, 1063, 1065, 1069, 1091, 1097, 1099, 1115, 1117, 1167, 1169, 1171, 1183, 1193, 1213, 1215, 1217, 1223, 1245, 1259, 1293, 1359, 1361, 1375, 1379, 1381, 1401, 1867, 1869, 1871, 1883, 1893, 1927, 1947, 1965, 1971, 2085, 2089, 2091, 2095, 2125, 2131, 2147, 2265, 2291, 2309, 2319, 2325, 2607, 2609, 2611, 2633, 2653, 2679, or 2691, wherein the 5′ nucleotide represented by U can be any nucleotide (e.g., U, A, C, G).
[0481] E39. The dsRNA of any one of E1-E29, wherein the antisense strand comprises a nucleobase sequence of any one of SEQ ID NOs: 235, 241, 247, 381, 383, 387, 389, 397, 407, 419, 465, 479, 521, 541, 565, 569, 751, 823, 831, 845, 869, 871, 875, 905, 1043, 1061, 1063, 1065, 1069, 1091, 1097, 1099, 1115, 1117, 1167, 1169, 1171, 1183, 1193, 1213, 1215, 1217, 1223, 1245, 1259, 1293, 1359, 1361, 1375, 1379, 1381, 1401, 1867, 1869, 1871, 1883, 1893, 1927, 1947, 1965, 1971, 2085, 2089, 2091, 2095, 2125, 2131, 2147, 2265, 2291, 2309, 2319, 2325, 2607, 2609, 2611, 2633, 2653, 2679, or 2691, wherein the 5′ nucleotide represented by U can be any nucleotide (e.g., U, A, C, G).
[0482] E40. The dsRNA of any one of E1-E29, wherein the antisense strand comprises a nucleobase sequence of any one of SEQ ID NOs: 381, 383, 387, 389, 397, 407, 419, 465, 479, 521, 541, 565, 569, 751, 823, 831, 845, 869, 871, 875, 905, 1043, 1061, 1063, 1065, 1069, 1091, 1097, 1099, 1115, 1117, 1167, 1169, 1171, 1183, 1193, 1213, 1215, 1217, 1223, 1245, 1867, 1869, 1871, 1883, 1893, 1927, 1947, 1965, 1971, 2085, 2089, 2091, 2095, 2125, 2131, 2147, 2265, 2291, 2309, 2319, 2325, 2607, 2609, 2611, 2633, 2653, 2679, or 2691, wherein the 5′ nucleotide represented by U can be any nucleotide (e.g., U, A, C, G).
[0483] E41. The dsRNA of any one of E1-E29, wherein the antisense strand comprises a nucleobase sequence of any one of SEQ ID NOs: 141, 157, 235, 241, 247, 381, 383, 387, 389, 397, 407, 419, 465, 479, 521, 541, 565, 569, 751, 823, 831, 845, 869, 871, 875, 905, 1043, 1061, 1063, 1065, 1069, 1091, 1097, 1099, 1115, 1117, 1167, 1169, 1171, 1183, 1193, 1213, 1215, 1217, 1223, 1245, 1259, 1293, 1359, 1361, 1375, 1379, 1381, 1401, 1867, 1869, 1871, 1883, 1893, 1927, 1947, 1965, 1971, 2085, 2089, 2091, 2095, 2125, 2131, 2147, 2265, 2291, 2309, 2319, 2325, 2607, 2609, 2611, 2633, 2653, 2679, or 2691, wherein the 5′ nucleotide represented by U can be any nucleotide (e.g., U, A, C, G).
[0484] E42. The dsRNA of any one of E1-E29, wherein the sense strand consists of a nucleobase sequence of any one of SEQ ID NOs: 140, 156, 234, 240, 246, 380, 382, 386, 388, 396, 406, 418, 464, 478, 520, 540, 564, 568, 750, 822, 830, 844, 868, 870, 874, 904, 1042, 1060, 1062, 1064, 1068, 1090, 1096, 1098, 1114, 1116, 1166, 1168, 1170, 1182, 1192, 1212, 1214, 1216, 1222, 1244, 1258, 1292, 1358, 1360, 1374, 1378, 1380, 1400, 1866, 1868, 1870, 1882, 1892, 1926, 1946, 1964, 1970, 2084, 2088, 2090, 2094, 2124, 2130, 2146, 2264, 2290, 2308, 2318, 2324, 2606, 2608, 2610, 2632, 2652, 2678, or 2690.
[0485] E43. The dsRNA of any one of E1-E29, wherein the sense strand consists of a nucleobase sequence of any one of SEQ ID NOs: 380, 382, 386, 388, 396, 406, 418, 464, 478, 520, 540, 564, 568, 750, 1166, 1168, 1170, 1182, 1192, 1212, 1214, 1216, 1222, 2264, 2290, 2308, or 2318.
[0486] E44. The dsRNA of any one of E1-E29, wherein the sense strand consists of a nucleobase sequence of any one of SEQ ID NOs: 380, 382, 386, 388, 396, 406, 418, 464, 478, 520, 540, 564, 568, 750, 822, 830, 844, 868, 870, 874, 904, 1060, 1062, 1064, 1068, 1090, 1096, 1098, 1114, 1116, 1166, 1168, 1170, 1182, 1192, 1212, 1214, 1216, 1222, 1244, 1258, 1292, 1358, 1360, 1374, 1378, 1380, 1400, 1866, 1868, 1870, 1882, 1892, 1926, 1946, 1964, 1970, 2084, 2088, 2090, 2094, 2124, 2130, 2146, 2264, 2290, 2308, 2318, 2324, 2606, 2608, 2610, 2632, 2652, 2678, or 2690.
[0487] E45. The dsRNA of any one of E1-E29, wherein the sense strand consists of a nucleobase sequence of any one of SEQ ID NOs: 234, 240, 246, 380, 382, 386, 388, 396, 406, 418, 464, 478, 520, 540, 564, 568, 750, 822, 830, 844, 868, 870, 874, 904, 1042, 1060, 1062, 1064, 1068, 1090, 1096, 1098, 1114, 1116, 1166, 1168, 1170, 1182, 1192, 1212, 1214, 1216, 1222, 1244, 1258, 1292, 1358, 1360, 1374, 1378, 1380, 1400, 1866, 1868, 1870, 1882, 1892, 1926, 1946, 1964, 1970, 2084, 2088, 2090, 2094, 2124, 2130, 2146, 2264, 2290, 2308, 2318, 2324, 2606, 2608, 2610, 2632, 2652, 2678, or 2690.
[0488] E46. The dsRNA of any one of E1-E29, wherein the sense strand consists of a nucleobase sequence of any one of SEQ ID NOs: 380, 382, 386, 388, 396, 406, 418, 464, 478, 520, 540, 564, 568, 750, 822, 830, 844, 868, 870, 874, 904, 1042, 1060, 1062, 1064, 1068, 1090, 1096, 1098, 1114, 1116, 1166, 1168, 1170, 1182, 1192, 1212, 1214, 1216, 1222, 1244, 1866, 1868, 1870, 1882, 1892, 1926, 1946, 1964, 1970, 2084, 2088, 2090, 2094, 2124, 2130, 2146, 2264, 2290, 2308, 2318, 2324, 2606, 2608, 2610, 2632, 2652, 2678, or 2690.
[0489] E47. The dsRNA of any one of E1-E29, wherein the sense strand consists of a nucleobase sequence of any one of SEQ ID NOs: 140, 156, 234, 240, 246, 380, 382, 386, 388, 396, 406, 418, 464, 478, 520, 540, 564, 568, 750, 822, 830, 844, 868, 870, 874, 904, 1042, 1060, 1062, 1064, 1068, 1090, 1096, 1098, 1114, 1116, 1166, 1168, 1170, 1182, 1192, 1212, 1214, 1216, 1222, 1244, 1258, 1292, 1358, 1360, 1374, 1378, 1380, 1400, 1866, 1868, 1870, 1882, 1892, 1926, 1946, 1964, 1970, 2084, 2088, 2090, 2094, 2124, 2130, 2146, 2264, 2290, 2308, 2318, 2324, 2606, 2608, 2610, 2632, 2652, 2678, or 2690.
[0490] E48. The dsRNA of any one of E1-E29, wherein the sense strand consists of a nucleobase sequence of any one of SEQ ID NOs: 141, 157, 235, 241, 247, 381, 383, 387, 389, 397, 407, 419, 465, 479, 521, 541, 565, 569, 751, 823, 831, 845, 869, 871, 875, 905, 1043, 1061, 1063, 1065, 1069, 1091, 1097, 1099, 1115, 1117, 1167, 1169, 1171, 1183, 1193, 1213, 1215, 1217, 1223, 1245, 1259, 1293, 1359, 1361, 1375, 1379, 1381, 1401, 1867, 1869, 1871, 1883, 1893, 1927, 1947, 1965, 1971, 2085, 2089, 2091, 2095, 2125, 2131, 2147, 2265, 2291, 2309, 2319, 2325, 2607, 2609, 2611, 2633, 2653, 2679, or 2691.
[0491] E49. The dsRNA of any one of E1-E29, wherein the antisense strand consists of a nucleobase sequence of any one of SEQ ID NOs: 381, 383, 387, 389, 397, 407, 419, 465, 479, 521, 541, 565, 569, 751, 1167, 1169, 1171, 1183, 1193, 1213, 1215, 1217, 1223, 2265, 2291, 2309, or 2319, wherein the 5′ nucleotide represented by U can be any nucleotide (e.g., U, A, C, G).
[0492] E50. The dsRNA of any one of E1-E29, wherein the antisense strand consists of a nucleobase sequence of any one of SEQ ID NOs: 381, 383, 387, 389, 397, 407, 419, 465, 479, 521, 541, 565, 569, 751, 823, 831, 845, 869, 871, 875, 905, 1061, 1063, 1065, 1069, 1091, 1097, 1099, 1115, 1117, 1167, 1169, 1171, 1183, 1193, 1213, 1215, 1217, 1223, 1245, 1259, 1293, 1359, 1361, 1375, 1379, 1381, 1401, 1867, 1869, 1871, 1883, 1893, 1927, 1947, 1965, 1971, 2085, 2089, 2091, 2095, 2125, 2131, 2147, 2265, 2291, 2309, 2319, 2325, 2607, 2609, 2611, 2633, 2653, 2679, or 2691, wherein the 5′ nucleotide represented by U can be any nucleotide (e.g., U, A, C, G).
[0493] E51. The dsRNA of any one of E1-E29, wherein the antisense strand consists of a nucleobase sequence of any one of SEQ ID NOs: 235, 241, 247, 381, 383, 387, 389, 397, 407, 419, 465, 479, 521, 541, 565, 569, 751, 823, 831, 845, 869, 871, 875, 905, 1043, 1061, 1063, 1065, 1069, 1091, 1097, 1099, 1115, 1117, 1167, 1169, 1171, 1183, 1193, 1213, 1215, 1217, 1223, 1245, 1259, 1293, 1359, 1361, 1375, 1379, 1381, 1401, 1867, 1869, 1871, 1883, 1893, 1927, 1947, 1965, 1971, 2085, 2089, 2091, 2095, 2125, 2131, 2147, 2265, 2291, 2309, 2319, 2325, 2607, 2609, 2611, 2633, 2653, 2679, or 2691, wherein the 5′ nucleotide represented by U can be any nucleotide (e.g., U, A, C, G).
[0494] E52. The dsRNA of any one of E1-E29, wherein the antisense strand consists of a nucleobase sequence of any one of SEQ ID NOs: 381, 383, 387, 389, 397, 407, 419, 465, 479, 521, 541, 565, 569, 751, 823, 831, 845, 869, 871, 875, 905, 1043, 1061, 1063, 1065, 1069, 1091, 1097, 1099, 1115, 1117, 1167, 1169, 1171, 1183, 1193, 1213, 1215, 1217, 1223, 1245, 1867, 1869, 1871, 1883, 1893, 1927, 1947, 1965, 1971, 2085, 2089, 2091, 2095, 2125, 2131, 2147, 2265, 2291, 2309, 2319, 2325, 2607, 2609, 2611, 2633, 2653, 2679, or 2691, wherein the 5′ nucleotide represented by U can be any nucleotide (e.g., U, A, C, G).
[0495] E53. The dsRNA of any one of E1-E29, wherein the antisense strand consists of a nucleobase sequence of any one of SEQ ID NOs: 141, 157, 235, 241, 247, 381, 383, 387, 389, 397, 407, 419, 465, 479, 521, 541, 565, 569, 751, 823, 831, 845, 869, 871, 875, 905, 1043, 1061, 1063, 1065, 1069, 1091, 1097, 1099, 1115, 1117, 1167, 1169, 1171, 1183, 1193, 1213, 1215, 1217, 1223, 1245, 1259, 1293, 1359, 1361, 1375, 1379, 1381, 1401, 1867, 1869, 1871, 1883, 1893, 1927, 1947, 1965, 1971, 2085, 2089, 2091, 2095, 2125, 2131, 2147, 2265, 2291, 2309, 2319, 2325, 2607, 2609, 2611, 2633, 2653, 2679, or 2691, wherein the 5′ nucleotide represented by U can be any nucleotide (e.g., U, A, C, G).
[0496] E54. The dsRNA of any one of E1-E53, wherein the dsRNA exhibits at least 50% mRNA inhibition at a 0.5 nM dsRNA concentration when determined using a cell assay when compared with a control cell.
[0497] E55. The dsRNA of any one of E1-E53, wherein the dsRNA exhibits at least 40% mRNA inhibition at a 0.5 nM dsRNA concentration when determined using a cell assay when compared with a control cell.
[0498] E56. The dsRNA of any one of E1-E53, wherein the dsRNA exhibits at least 30% mRNA inhibition at a 0.5 nM dsRNA concentration when determined using a cell assay when compared with a control cell.
[0499] E57. The dsRNA of any one of E1-E53, wherein the dsRNA exhibits at least 70% mRNA inhibition at a 10 nM dsRNA concentration when determined using a cell assay when compared with a control cell.
[0500] E58. The dsRNA of any one of E1-E53, wherein the dsRNA exhibits at least 60% mRNA inhibition at a 10 nM dsRNA concentration when determined using a cell assay when compared with a control cell.
[0501] E59. The dsRNA of any one of E1-E53, wherein the dsRNA exhibits at least 50% mRNA inhibition at a 10 nM dsRNA concentration when determined using a cell assay when compared with a control cell.
[0502] E60. The dsRNA of any one of E1-E59, wherein the antisense strand is complementary to at least 17 contiguous nucleotides of an MSH3 gene.
[0503] E61. The dsRNA of any one of E1-E59, wherein the antisense strand is complementary to at least 19 contiguous nucleotides of an MSH3 gene.
[0504] E62. The dsRNA of any one of E1-E59, wherein the antisense strand is complementary to 19 contiguous nucleotides of an MSH3 gene.
[0505] E63. The dsRNA of any one of E1-E59, wherein the sense strand is complementary to at least 17 contiguous nucleotides of an MSH3 gene.
[0506] E64. The dsRNA of any one of E1-E59, wherein the sense strand is complementary to at least 19 contiguous nucleotides of an MSH3 gene.
[0507] E65. The dsRNA of any one of E1-E59, wherein the sense strand is complementary to 19 contiguous nucleotides of an MSH3 gene.
[0508] E66. The dsRNA of any one of E1-E65, wherein the antisense strand and/or the sense strand comprises a 3′ overhang of at least 1 linked nucleoside; or a 3′ overhang of at least 2 linked nucleosides.
[0509] E67. A pharmaceutical composition comprising one or more dsRNAs of any one of E1-E66 and a pharmaceutically acceptable carrier.
[0510] E68. A composition comprising one or more dsRNAs of any one of E1-E66 and a lipid nanoparticle, a polyplex nanoparticle, a lipoplex nanoparticle, or a liposome.
[0511] E69. A vector encoding at least one strand of the dsRNA of any one of E1-E66.
[0512] E70. A cell comprising the vector of E69.
[0513] E71. A method of reducing transcription of MSH3 in a cell, the method comprising contacting the cell with the dsRNA of any one of E1-E66, the pharmaceutical composition of E67, the composition of E68, the vector of E69, or the cell of E70 for a time sufficient to obtain degradation of an mRNA transcript of MSH3, thereby reducing expression of MSH3 in the cell.
[0514] E72. A method of treating, preventing, or delaying progression of a trinucleotide repeat expansion disorder in a subject in need thereof, the method comprising administering to the subject the dsRNA of any one of E1-E66, the pharmaceutical composition of E67, the composition of E68, the vector of E69, or the cell of E70.
[0515] E73. A method of reducing the level and/or activity of MSH3 in a cell of a subject identified as having a nucleotide repeat expansion disorder, the method comprising contacting the cell with the dsRNA of any one of E1-E66, the pharmaceutical composition of E67, the composition of E68, the vector of E69, or the cell of E70.
[0516] E74. A method for reducing expression of MSH3 in a cell comprising contacting the cell with the dsRNA of any one of E1-E66, the pharmaceutical composition of E67, the composition of E68, the vector of E69, or the cell of E70 and maintaining the cell for a time sufficient to obtain degradation of an mRNA transcript of MSH3, thereby reducing expression of MSH3 in the cell.
[0517] E75. A method of decreasing nucleotide repeat expansion in a cell, the method comprising contacting the cell with the dsRNA of any one of E1-E66, the pharmaceutical composition of E67, the composition of E68, the vector of E69, or the cell of E70.
[0518] E76. The method of E74 or E75, wherein the cell is in a subject.
[0519] E77. The method of any one of E72, E73, and E76, wherein the subject is a human.
[0520] E78. The method of any one of E71 and 73-E76, wherein the cell is a cell of the central nervous system or a muscle cell.
[0521] E79. The method of any one of E72, E73, and E76-E78, wherein the subject is identified as having a nucleotide repeat expansion disorder.
[0522] E80. The method of any one of E72, E73, and E75-E79 wherein the nucleotide repeat expansion disorder is a polyglutamine disease.
[0523] E81. The method of E80, wherein the polyglutamine disease is selected from the group consisting of dentatorubropallidoluysian atrophy, Huntington's disease, spinal and bulbar muscular atrophy, spinocerebellar ataxia type 1, spinocerebellar ataxia type 2, spinocerebellar ataxia type 3, spinocerebellar ataxia type 6, spinocerebellar ataxia type 7, spinocerebellar ataxia type 17, and Huntington's disease-like 2.
[0524] E82. The method of any one of E72, E73, and E75-E79, wherein the nucleotide repeat expansion disorder is a non-polyglutamine disease.
[0525] E83. The method of E82, wherein the non-polyglutamine disease is selected from the group consisting of fragile X syndrome, fragile X-associated tremor/ataxia syndrome, fragile XE mental retardation, Friedreich's ataxia, myotonic dystrophy type 1, spinocerebellar ataxia type 8, spinocerebellar ataxia type 12, oculopharyngeal muscular dystrophy, Fragile X-associated premature ovarian failure, FRA2A syndrome, FRA7A syndrome, and early infantile epileptic encephalopathy.
[0526] E84. A dsRNA of any one of E1-E66, the pharmaceutical composition of E67, the composition of E68, the vector of E69, or the cell of E70 for use in prevention or treatment of a nucleotide repeat expansion disorder.
[0527] E85. The dsRNA, the pharmaceutical composition, the composition, the vector, or the cell of E84, wherein the nucleotide repeat expansion disorder is selected from the group consisting of dentatorubropallidoluysian atrophy, Huntington's disease, spinal and bulbar muscular atrophy, spinocerebellar ataxia type 1, spinocerebellar ataxia type 2, spinocerebellar ataxia type 3, spinocerebellar ataxia type 6, spinocerebellar ataxia type 7, spinocerebellar ataxia type 17, Huntington's disease-like 2, fragile X syndrome, fragile X-associated tremor/ataxia syndrome, fragile XE mental retardation, Friedreich's ataxia, myotonic dystrophy type 1, spinocerebellar ataxia type 8, spinocerebellar ataxia type 12, oculopharyngeal muscular dystrophy, Fragile X-associated premature ovarian failure, FRA2A syndrome, FRA7A syndrome, and early infantile epileptic encephalopathy.
[0528] E86. The dsRNA, the pharmaceutical composition, the composition, the vector, or the cell of E84 or E85, wherein the nucleotide repeat expansion disorder is Huntington's disease.
[0529] E87. The dsRNA, the pharmaceutical composition, the composition, the vector, or the cell of E84 or E85, wherein the nucleotide repeat expansion disorder is Friedreich's ataxia.
[0530] E88. The dsRNA, the pharmaceutical composition, the composition, the vector, or the cell of E84 or E85, wherein the nucleotide repeat expansion disorder is myotonic dystrophy type 1.
[0531] E89. The dsRNA, the pharmaceutical composition, the composition, the vector, or the cell of any of E84-E88, wherein the dsRNA, pharmaceutical composition, composition, vector, or cell is administered intrathecally.
[0532] E90. The dsRNA, the pharmaceutical composition, the composition, the vector, or the cell of any of E84-E88, wherein the dsRNA, pharmaceutical composition, composition, vector, or cell is administered intraventricularly.
[0533] E91. The dsRNA, the pharmaceutical composition, the composition, the vector, or the cell of any of E84-E88, wherein the dsRNA, pharmaceutical composition, composition, vector, or cell is administered intramuscularly.
[0534] E92. A method of treating, preventing, or delaying progression of a disorder in a subject in need thereof wherein the subject is suffering from nucleotide repeat expansion disorder, comprising administering to said subject the dsRNA of any one of E1-E66, the pharmaceutical composition of E67, the composition of E68, the vector of E69, or the cell of E70.
[0535] E93. The method of E92, further comprising administering at least one additional therapeutic agent.
[0536] E94. The method of E93, wherein at least one additional therapeutic agent is an antisense oligonucleotide that hybridizes to an mRNA encoding the Huntingtin gene.
[0537] E95. A method of preventing or delaying progression of a nucleotide repeat expansion disorder in a subject, the method comprising administering to the subject the dsRNA of any one of E1-E66, the pharmaceutical composition of E67, the composition of E68, the vector of E69, or the cell of E70 in an amount effective to delay progression of a nucleotide repeat expansion disorder of the subject.
[0538] E96. The method of E95, wherein the nucleotide repeat expansion disorder is selected from the group consisting of dentatorubropallidoluysian atrophy, Huntington's disease, spinal and bulbar muscular atrophy, spinocerebellar ataxia type 1, spinocerebellar ataxia type 2, spinocerebellar ataxia type 3, spinocerebellar ataxia type 6, spinocerebellar ataxia type 7, spinocerebellar ataxia type 17, Huntington's disease-like 2, fragile X syndrome, fragile X-associated tremor/ataxia syndrome, fragile XE mental retardation, Friedreich's ataxia, myotonic dystrophy type 1, spinocerebellar ataxia type 8, spinocerebellar ataxia type 12, oculopharyngeal muscular dystrophy, Fragile X-associated premature ovarian failure, FRA2A syndrome, FRA7A syndrome, and early infantile epileptic encephalopathy.
[0539] E97. The method of E95 or E96, wherein the nucleotide repeat expansion disorder is Huntington's disease.
[0540] E98. The method of E95 or E96, wherein the nucleotide repeat expansion disorder is Friedrich's ataxia.
[0541] E99. The method of E95 or E96, wherein the nucleotide repeat expansion disorder is myotonic dystrophy type 1.
[0542] E100. The method of any of E95 or E96, further comprising administering at least one additional therapeutic agent.
[0543] E101. The method of E100, wherein at least one additional therapeutic agent is an antisense oligonucleotide that hybridizes to an mRNA encoding the Huntingtin gene.
[0544] E102. The method of any of E94-E101, wherein progression of the nucleotide repeat expansion disorder is delayed by at least 120 days, for example, at least 6 months, at least 12 months, at least 2 years, at least 3 years, at least 4 years, at least 5 years, at least 10 years or more, when compared with a predicted progression.
[0545] E103. A dsRNA of any one of E1-E66, the pharmaceutical composition of E67, the composition of E68, the vector of E69, or the cell of E70, for use in preventing or delaying progression of a nucleotide repeat expansion disorder in a subject.
[0546] E104. The dsRNA, the pharmaceutical composition, the composition, the vector, or the cell of E103, wherein the nucleotide repeat expansion disorder is selected from the group consisting of dentatorubropallidoluysian atrophy, Huntington's disease, spinal and bulbar muscular atrophy, spinocerebellar ataxia type 1, spinocerebellar ataxia type 2, spinocerebellar ataxia type 3, spinocerebellar ataxia type 6, spinocerebellar ataxia type 7, spinocerebellar ataxia type 17, Huntington's disease-like 2, fragile X syndrome, fragile X-associated tremor/ataxia syndrome, fragile XE mental retardation, Friedreich's ataxia, myotonic dystrophy type 1, spinocerebellar ataxia type 8, spinocerebellar ataxia type 12, oculopharyngeal muscular dystrophy, Fragile X-associated premature ovarian failure, FRA2A syndrome, FRA7A syndrome, and early infantile epileptic encephalopathy.
[0547] E105. The dsRNA, the pharmaceutical composition, the composition, the vector, or the cell of E103 or E104, wherein the nucleotide repeat expansion disorder is Huntington's disease.
[0548] E106. The dsRNA, the pharmaceutical composition, the composition, the vector, or the cell of E103 or E104, wherein the nucleotide repeat expansion disorder is Friedrich's ataxia.
[0549] E107. The dsRNA, the pharmaceutical composition, the composition, the vector, or the cell of E103 or E104, wherein the nucleotide repeat expansion disorder is myotonic dystrophy type 1.
[0550] E108. The dsRNA, the pharmaceutical composition, the composition, the vector, or the cell of any one of E103-E107, wherein progression of the nucleotide repeat expansion disorder is delayed by at least 120 days, for example, at least 6 months, at least 12 months, at least 2 years, at least 3 years, at least 4 years, at least 5 years, at least 10 years or more, when compared with a predicted progression.
[0551] E109. The dsRNA, the pharmaceutical composition, the composition, the vector, or the cell of any one of claims E103-E107, wherein progression of the nucleotide repeat expansion disorder is delayed by at least 120 days, for example, at least 6 months, at least 12 months, at least 2 years, at least 3 years, at least 4 years, at least 5 years, at least 10 years or at least 20 years or more, when compared with a predicted progression.
[0552] E110. The dsRNA of any one of E1-E4, wherein the region the sense or antisense strand is complementary to is at least 15 contiguous nucleotides of an MSH3 gene corresponding to a sequence of reference mRNA NM_002439.4 at one or more of positions 430-453, 508-531, 560-599, 609-632, 681-721, 768-797, 823-856, 882-927, 968-1029, 1039-1096, 1106-1175, 1188-1217, 1272-1297, 1419-1474, 1489-1516, 1540-1627, 1633-1815, 1819-1842, 1899-1937, 2027-2066, 2085-2108, 2117-2156, 2163-2187, 2195-2241, 2293-2343, 2347-2374, 2493-2539, 2567-2590, 2619-2649, 2737-2764, 2779-2820, 2871-2894, 2900-2923, 2949-2972, 3049-3096, 3217-3266, 3272-3309, 3351-3383, 3386-3415, 3537-3560, 3581-3619, 3686-3728, 3754-3778, 3782-3805, 3909-3935, 4287-4310, or 4386-4412 of the MSH3 gene.
[0553] E111. The dsRNA of any one of E1-E4, wherein the region the sense or antisense strand is complementary to is at least 15 contiguous nucleotides of an MSH3 gene corresponding to a sequence of reference mRNA NM_002439.4 at one or more of positions 508-531, 827-856, 903-926, 1073-1096, 1126-1149, 1583-1609, 1639-1662, 1727-1750, 1755-1795, 1819-1842, 1905-1937, 2130-2153, 2293-2316, 2505-2528, 2625-2648, 2797-2820, 3073-3096, 3217-3240, 3351-3383, 3686-3728, 3754-3777, 4287-4310, or 4386-4412 of the MSH3 gene.
[0554] E112. The dsRNA of any one of E1-E4, wherein the region the sense or antisense strand is complementary to is at least 15 contiguous nucleotides of an MSH3 gene corresponding to a sequence of reference mRNA NM_002439.4 at one or more of positions 508-531, 833-856, 1073-1096, 1126-1149, 1583-1609, 1639-1662, 1727-1750, 1755-1795, 1914-1937, 2130-2153, 2293-2316, 2797-2820, 3073-3096, 3217-3240, 3596-3619, 3700-3723, 3754-3777, or 4386-4409 of the MSH3 gene.
[0555] E113. The dsRNA of any one of E1-E4, wherein the region the sense or antisense strand is complementary to is at least 15 contiguous nucleotides of an MSH3 gene corresponding to a sequence of reference mRNA NM_002439.4 at one or more of positions 1073-1096, 1586-1609, 1755-1795, 1914-1937, 2130-2153, 2293-2316, 3217-3240, or 4386-4409 of the MSH3 gene
[0556] E114. The dsRNA of any one of E1-E4, wherein the region the sense or antisense strand is complementary to is at least 15 contiguous nucleotides of an MSH3 gene corresponding to a sequence of reference mRNA NM_002439.4 at positions 908-925 of the MSH3 gene.
[0557] E115. The dsRNA of any one of E1-E4, wherein the region the sense or antisense strand is complementary to is at least 15 contiguous nucleotides of an MSH3 gene corresponding to a sequence of reference mRNA NM_002439.4 at positions 1167-1184 of the MSH3 gene.
[0558] E116. The dsRNA of any one of E1-E4, wherein the region the sense or antisense strand is complementary to is at least 15 contiguous nucleotides of an MSH3 gene corresponding to a sequence of reference mRNA NM_002439.4 at positions 1143-1166 of the MSH3 gene.
[0559] E117. The dsRNA of any one of E1-E4, wherein the region the sense or antisense strand is complementary to is at least 15 contiguous nucleotides of an MSH3 gene corresponding to a sequence of reference mRNA NM_002439.4 at positions 1150-1173 of the MSH3 gene
[0560] E118. The dsRNA of any one of E1-E4, wherein the region the sense or antisense strand is complementary to is at least 15 contiguous nucleotides of an MSH3 gene corresponding to a sequence of reference mRNA NM_002439.4 at positions 2090-2107 of the MSH3 gene
[0561] E119. The dsRNA of any one of E1-E4, wherein the region the sense or antisense strand is complementary to is at least 15 contiguous nucleotides of an MSH3 gene corresponding to a sequence of reference mRNA NM_002439.4 at positions 1040-1057 of the MSH3 gene
[0562] E120. The dsRNA of any one of E1-E4, wherein the region the sense or antisense strand is complementary to is at least 15 contiguous nucleotides of an MSH3 gene corresponding to a sequence of reference mRNA NM_002439.4 at positions 2018-2035 of the MSH3 gene
[0563] E121. The dsRNA of any one of E1-E4, wherein the region the sense or antisense strand is complementary to is at least 15 contiguous nucleotides of an MSH3 gene corresponding to a sequence of reference mRNA NM_002439.4 at positions 1469-1486 of the MSH3 gene
[0564] E122. The dsRNA of any one of E1-E4, wherein the region the sense or antisense strand is complementary to is at least 15 contiguous nucleotides of an MSH3 gene corresponding to a sequence of reference mRNA NM_002439.4 at positions 1128-1151 of the MSH3 gene.
[0565] E123. The dsRNA of any one of E1-E4, wherein the region the sense or antisense strand is complementary to is at least 15 contiguous nucleotides of an MSH3 gene corresponding to a sequence of reference mRNA NM_002439.4 at positions 828-851 of the MSH3 gene.
[0566] E124. The dsRNA of any one of E1-E4, wherein the antisense strand comprises an antisense nucleobase sequence selected from Table 12, wherein the 5′ nucleotide represented by U can be any nucleotide (e.g., U, A, C, G), and the sense strand comprises a sense nucleobase sequence complementary to the antisense nucleobase sequence.
[0567] E125. The dsRNA of any one of E1-E4, wherein the antisense nucleobase sequence consists of an antisense strand in Table 12, wherein the 5′ nucleotide represented by U can be any nucleotide (e.g., U, A, C, G), and the sense nucleobase sequence consists of a sequence complementary to the antisense nucleobase sequence.
[0568] E126. The dsRNA of any one of E1-E4, wherein the sense strand comprises a sense nucleobase sequence selected from Table 12, and the antisense strand comprises an antisense nucleobase sequence complementary to the sense nucleobase sequence.
[0569] E127. The dsRNA of any one of E1-E4, wherein the sense nucleobase sequence consists of a sense strand in Table 12, and the antisense nucleobase sequence consists of a sequence complementary to the sense nucleobase sequence.
[0570] E128. The dsRNA of any one of E109-E127, wherein the dsRNA comprises at least one alternative nucleobase, at least one alternative internucleoside linkage, at least one alternative sugar moiety, or a combination thereof, optionally wherein the sense strand is selected from Table 13 and the antisense strand is selected from Table 14.
[0571] E129. The dsRNA of E127, wherein at least one alternative internucleoside linkage is a phosphorothioate internucleoside linkage.
[0572] E130. The dsRNA of E127, wherein at least one alternative internucleoside linkage is a 2′-alkoxy internucleoside linkage.
[0573] E131. The dsRNA of E127, wherein at least one alternative internucleoside linkage is an alkyl phosphate internucleoside linkage.
[0574] E132. The dsRNA of E127, wherein at least one alternative nucleobase is 5′-methylcytosine, pseudouridine, or 5-methoxyuridine.
[0575] E133. The dsRNA of E127, wherein at least one alternative sugar moiety is 2′-OMe or a bicyclic nucleic acid.
[0576] E134. The dsRNA of E127, wherein the dsRNA comprises at least one 2′-OMe sugar moiety and at least one phosphorothioate internucleoside linkage.
[0577] E135. The dsRNA of any one of E110-E134, wherein the dsRNA further comprises a ligand conjugated to the 3′ end of the sense strand through a monovalent or branched bivalent or trivalent linker.
[0578] E136. The dsRNA of any one of E110-135, wherein the sense strand comprises a nucleobase sequence of any one of SEQ ID NOs: 78, 82, 104, 148, 158, 160, 190, 240, 244, 246, 250, 252, 260, 308, 314, 316, 354,356, 360, 362, 364, 368, 370, 372, 396, 414, 416, 418, 474, 476,478, 480, 502, 512, 552 558, 560, 582, 616, 618, 634, 636, 642, 646, 648, 656, 660, 690, 692, 718, 720, 722, 796, 820, 822, 826, 848, 852, 854, 900, 914, 928, 930, 934,936, 946, 948, 966, 970,972, 988, 990, 992, 994, 996, 1006, 1020, 1032, 1054, 1056, 1058, 1076, 1088, 1096, 1098, 1110, 1112, 1126, 1214, 1220, 1230, 1306, 1308, 1310, 1318, 1326, 1386, 1394, 1396, 1400, 1404, 1424, 1426, 1448, 1452, 1454, 1506, 1524, 1540, 1546, 1656, 1666, 1674, 1676, 1678, 1722, 1762, 1766, 1768, 1836, 1838, 1842, 1868, 1886, 1888, 1964, 1990, 2030, 2108, 2128, 2230, 2242, 2246, 2254, 2274, 2294, 2330, 2334, 2356, 2360, 2362, 2448, 2502, 2504, 2516, 2518, 2578, 2580, 2592, 2596, 2602, 2654, 2656, 2686, 2762, 2768, 2782, 2844, or 2846.
[0579] E137. The dsRNA of any one of E110-E135, wherein the sense strand comprises a nucleobase sequence of any one of SEQ ID NOs: 362, 370, 372, 416, 582, 634, 930, 934, 970, 1054, 1076, 1088, 1096, 1098, 1126, 1220, 1230, 1400, 1506, 1666, 1766, 1888, 2128, 2230, 2330, 2334, 2448, 2504, 2516, 2518, 2578, 2592, 2596, 2602, 2654, 2782, 2844, or 2846.
[0580] E138. The dsRNA of any one of E110-E135, wherein the sense strand comprises a nucleobase sequence of any one of SEQ ID NOs: 104, 372, 582, 634, 930, 934, 970, 1054, 1076, 1088, 1098, 1230, 1400, 1506, 1888, 2128, E2230, 2518, 2592, 2654, or 2844.
[0581] E139. The dsRNA of any one of E110-E135, wherein the sense strand comprises a nucleobase sequence of any one of SEQ ID NOs: 582, 934, 1076, 1088, 1098, 1230, 1400, 1506, 2230, or 2844.
[0582] E140. The dsRNA of any one of E110-E135, wherein the sense strand consists of a nucleobase sequence of any one of SEQ ID NOs: 78, 82, 104, 148, 158, 160, 190, 240, 244, 246, 250, 252, 260, 308, 314, 316, 354, 356, 360, 362, 364, 368, 370, 372, 396, 414, 416, 418, 474, 476, 478, 480, 502, 512, 552, 558, 560, 582, 616, 618, 634, 636, 642, 646, 648, 656, 660, 690, 692, 718, 720, 722, 796, 820, 822, 826, 848, 852, 854, 900, 914, 928, 930, 934, 936, 946, 948, 966, 970, 972, 988, 990, 992, 994, 996, 1006, 1020, 1032, 1054, 1056, 1058, 1076, 1088, 1096, 1098, 1110, 1112, 1126, 1214, 1220, 1230, 1306, 1308, 1310, 1318, 1326, 1386, 1394, 1396, 1400, 1404, 1424, 1426, 1448, 1452, 1454, 1506, 1524, 1540, 1546, 1656, 1666, 1674, 1676, 1678, 1722, 1762, 1766, 1768, 1836, 1838, 1842, 1868, 1886, 1888, 1964, 1990, 2030, 2108, 2128, 2230, 2242, 2246, 2254, 2274, 2294, 2330, 2334, 2356, 2360, 2362, 2448, 2502, 2504, 2516, 2518, 2578, 2580, 2592, 2596, 2602, 2654, 2656, 2686, 2762, 2768, 2782, 2844, or 2846.
[0583] E141. The dsRNA of any one of E110-E135, wherein the sense strand consists of a nucleobase sequence of any one of SEQ ID NOs: 104, 362, 370, 372, 416, 582, 634, 930, 934, 970, 1054, 1076, 1088, 1096, 1098, 1126, 1220, 1230, 1400, 1506, 1666, 1766, 1888, 2128, 2230, 2330, 2334, 2448, 2504, 2516 2518, 2578, 2592, 2596, 2602, 2654, 2782, 2844, or 2846.
[0584] E142. The dsRNA of any one of E110-E135, wherein the sense strand consists of a nucleobase sequence of any one of SEQ ID NOs: 104, 372, 582, 634, 930, 934, 970, 1054, 1076, 1088, 1098, 1230, 1400, 1506, 1888, 2128, 2230, 2518, 2592, 2654, or 2844.
[0585] E143. The dsRNA of any one of E110-E135, wherein the sense strand consists of a nucleobase sequence of any one of SEQ ID NOs: 582, 934, 1076, 1088, 1098, 1230, 1400, 1506, 2230, or 2844
[0586] E144. The dsRNA of any one of E110-E135, wherein the sense strand consists of a nucleobase sequence of any one of SEQ ID NOs: 78, 82, 104, 148, 158, 160, 190, 240, 244, 246, 250, 252, 260, 308, 314, 316, 354, 356, 360, 362, 364, 368, 370, 372, 396, 414, 416, 418, 474, 476,478, 480, 502, 512, 552 558, 560, 582, 616, 618, 634, 636, 642, 646, 648, 656, 660, 690, 692, 718, 720, 722, 796, 820, 822, 826, 848, 852, 854, 900, 914, 928, 930, 934,936, 946, 948, 966, 970,972, 988, 990, 992, 994, 996, 1006, 1020, 1032, 1054, 1056, 1058, 1076, 1088, 1096, 1098, 1110, 1112, 1126, 1214, 1220, 1230, 1306, 1308, 1310, 1318, 1326, 1386, 1394, 1396, 1400, 1404, 1424, 1426, 1448, 1452, 1454, 1506, 1524, 1540, 1546, 1656, 1666, 1674, 1676, 1678, 1722, 1762, 1766, 1768, 1836, 1838, 1842, 1868, 1886, 1888, 1964, 1990, 2030, 2108, 2128, 2230, 2242, 2246, 2254, 2274, 2294, 2330, 2334, 2356, 2360, 2362, 2448, 2502, 2504, 2516, 2518, 2578, 2580, 2592, 2596, 2602, 2654, 2656, 2686, 2762, 2768, 2782, 2844, or 2846 and an overhang of 1-4 nucleotides.
[0587] E145. The dsRNA of any one of E110-E135, wherein the sense strand consists of a nucleobase sequence of any one of SEQ ID NOs: 104, 362, 370, 372, 416, 582, 634, 930, 934, 970, 1054, 1076, 1088, 1096, 1098, 1126, 1220, 1230, 1400, 1506, 1666, 1766, 1888, 2128, 2230, 2330, 2334, 2448, 2504, 2516, 2518, 2578, 2592, 2596, 2602, 2654, 2782, 2844, or 2846 and an overhang of 1-4 nucleotides.
[0588] E146. The dsRNA of any one of E110-E135, wherein the sense strand consists of a nucleobase sequence of any one of SEQ ID NOs: 104, 372, 582, 634,930, 934, 970, 1054, 1076, 1088, 1098, 1230, 1400, 1506, 1888, 2128, 2230, 2518, 2592, 2654, or 2844 and an overhang of 1-4 nucleotides.
[0589] E147. The dsRNA of any one of E110-E135, wherein the sense strand consists of a nucleobase sequence of any one of SEQ ID NOs: 582, 934, 1076, 1088, 1098, 1230, 1400, 1506, 2230, or 2844 and an overhang of 1-4 nucleotides.
[0590] E148. The dsRNA of any one of E110-E135, wherein the antisense strand comprises a nucleobase sequence of any one of SEQ ID NOs: 79, 83, 105, 149, 159, 161, 191, 241, 245, 247, 251, 253, 261, 309, 315, 317, 355, 357, 361, 363, 365, 369, 371, 373, 379, 415, 417, 419, 475, 477, 479, 481, 503, 513, 553, 559, 561, 583, 617, 619, 635, 637, 643, 647, 649, 657, 661, 691, 693, 719, 721, 723, 797, 821, 823, 827, 849, 853, 855, 901, 915, 929, 931, 935, 937, 947, 949, 967, 971, 973, 989, 991, 993, 995, 997, 1007, 1021, 1032, 1055, 1057, 1059, 1077, 1089, 1097, 1099, 1111, 1113, 1127, 1215, 1221, 1230, 1307, 1309, 1311, 1319, 1363, 1387, 1395, 1397, 1401, 1405, 1425, 1427, 1449, 1453, 1455, 1507, 1525, 1541, 1547, 1657, 1667, 1675, 1677, 1679, 1723, 1763, 1767, 1769, 1837, 1839, 1843, 1869, 1887, 1889, 1965, 1991, 2031, 2109, 2129, 2231, 2243, 2247, 2255, 2275, 2295, 2331, 2335, 2357, 2361, 2363, 2449, 2503, 2505, 2517, 2519, 2579, 2581, 2593, 2597, 2603, 2655, 2657, 2687, 2763, 2769, 2783, 2845, or 2847, wherein the 5′ nucleotide represented by U can be any nucleotide (e.g., U, A, C, G).
[0591] E149. The dsRNA of any one of E110-E135, wherein the antisense strand comprises a nucleobase sequence of any one of SEQ ID NOs: 104, 362, 370, 372, 416, 582, 634, 930, 934, 970, 1054, 1076, 1088, 1096, 1098, 1126, 1220, 1230, 1400, 1506, 1666, 1766, 1888, 2128, 2230, 2330, 2334, 2448, 2504, 2516, 2518, 2578, 2592, 2596, 2602, 2654, 278, 2844, or 2846, wherein the 5′ nucleotide represented by U can be any nucleotide (e.g., U, A, C, G).
[0592] E150. The dsRNA of any one of E110-E135, wherein the antisense strand comprises a nucleobase sequence of any one of SEQ ID NOs: 104, 372, 582, 634, 930, 934, 970, 1054, 1076, 1088, 1098, 1230, 1400, 1506, 1888, 2128, 2230, 2518, 2592, 2654, or 2844, wherein the 5′ nucleotide represented by U can be any nucleotide (e.g., U, A, C, G).
[0593] E151. The dsRNA of any one of E110-E135, wherein the antisense strand comprises a nucleobase sequence of any one of SEQ ID NOs: 582, 934, 1076, 1088, 1098, 1230, 1400, 1506, 2230, or 2844, wherein the 5′ nucleotide represented by U can be any nucleotide (e.g., U, A, C, G)
[0594] E152. The dsRNA of any one of E110-E135, wherein the antisense strand consists of a nucleobase sequence of any one of SEQ ID NOs: 79, 83, 105, 149, 159, 161, 191, 241, 245, 247, 251, 253, 261, 309, 315, 317, 355, 357, 361, 363, 365, 369, 371, 373, 379, 415, 417, 419, 475, 477, 479, 481, 503, 513, 553, 559, 561, 583, 617, 619, 635, 637, 643, 647, 649, 657, 661, 691, 693, 719, 721, 723, 797, 821, 823, 827, 849, 853, 855, 901, 915, 929, 931, 935, 937, 947, 949, 967, 971, 973, 989, 991, 993, 995, 997, 1007, 1021, 1032, 1055, 1057, 1059, 1077, 1089, 1097, 1099, 1111, 1113, 1127, 1215, 1221, 1230, 1307, 1309, 1311, 1319, 1363, 1387, 1395, 1397, 1401, 1405, 1425, 1427, 1449, 1453, 1455, 1507, 1525, 1541, 1547, 1657, 1667, 1675, 1677, 1679, 1723, 1763, 1767, 1769, 1837, 1839, 1843, 1869, 1887, 1889, 1965, 1991, 2031, 2109, 2129, 2231, 2243, 2247, 2255, 2275, 2295, 2331, 2335, 2357, 2361, 2363, 2449, 2503, 2505, 2517, 2519, 2579, 2581, 2593, 2597, 2603, 2655, 2657, 2687, 2763, 2769, 2783, 2845, or 2847, wherein the 5′ nucleotide represented by U can be any nucleotide (e.g., U, A, C, G).
[0595] E153. The dsRNA of any one of E110-E135, wherein the antisense strand consists of a nucleobase sequence of any one of SEQ ID NOs: 104, 362, 370, 372, 416, 582, 634, 930, 934, 970, 1054, 1076, 1088, 1096, 1098, 1126, 1220, 1230, 1400, 1506, 1666, 1766, 1888, 2128, 2230, 2330, 2334, 2448, 2504, 2516, 2518, 2578, 2592, 2596, 2602, 2654, 2782, 2844, or 2846, wherein the 5′ nucleotide represented by U can be any nucleotide (e.g., U, A, C, G).
[0596] E154. The dsRNA of any one of E110-E135, wherein the antisense strand consists of a nucleobase sequence of any one of SEQ ID NOs: 104, 372, 582, 634, 930, 934, 970, 1054, 1076, 1088, 1098, 1230, 1400, 1506, 1888, 2128, 2230, 2518, 2592, 2654, or 2844, wherein the 5′ nucleotide represented by U can be any nucleotide (e.g., U, A, C, G).
[0597] E155. The dsRNA of any one of E110-E135, wherein the antisense strand consists of a nucleobase sequence of any one of SEQ ID NOs: 582, 934, 1076, 1088, 1098, 1230, 1400, 1506, 2230, or 2844, wherein the 5′ nucleotide represented by U can be any nucleotide (e.g., U, A, C, G)
[0598] E156. The dsRNA of any one of E110-E135, wherein the antisense strand consists of a nucleobase sequence of any one of SEQ ID NOs: 79, 83, 105, 149, 159, 161, 191, 241, 245, 247, 251, 253, 261, 309, 315, 317, 355, 357, 361, 363, 365, 369, 371, 373, 379, 415, 417, 419, 475, 477, 479, 481, 503, 513, 553, 559, 561, 583, 617, 619, 635, 637, 643, 647, 649, 657, 661, 691, 693, 719, 721, 723, 797, 821, 823, 827, 849, 853, 855, 901, 915, 929, 931, 935, 937, 947, 949, 967, 971, 973, 989, 991, 993, 995, 997, 1007, 1021, 1032, 1055, 1057, 1059, 1077, 1089, 1097, 1099, 1111, 1113, 1127, 1215, 1221, 1230, 1307, 1309, 1311, 1319, 1363, 1387, 1395, 1397, 1401, 1405, 1425, 1427, 1449, 1453, 1455, 1507, 1525, 1541, 1547, 1657, 1667, 1675, 1677, 1679, 1723, 1763, 1767, 1769, 1837, 1839, 1843, 1869, 1887, 1889, 1965, 1991, 2031, 2109, 2129, 2231, 2243, 2247, 2255, 2275, 2295, 2331, 2335, 2357, 2361, 2363, 2449, 2503, 2505, 2517, 2519, 2579, 2581, 2593, 2597, 2603, 2655, 2657, 2687, 2763, 2769, 2783, 2845, or 2847, wherein the 5′ nucleotide represented by U can be any nucleotide (e.g., U, A, C, G), and an overhang of 1-4 nucleotides.
[0599] E157. The dsRNA of any one of E110-E135, wherein the antisense strand consists of a nucleobase sequence of any one of SEQ ID NOs: 104, 362, 370, 372, 416, 582, 634, 930, 934, 970, 1054, 1076, 1088, 1096, 1098, 1126, 1220, 1230, 1400, 1506, 1666, 1766, 1888, 2128, 2230, 2330, 2334, 2448, 2504, 2516, 2518, 2578, 2592, 2596, 2602, 2654, 2782, 2844, or 2846, wherein the 5′ nucleotide represented by U can be any nucleotide (e.g., U, A, C, G), and an overhang of 1-4 nucleotides.
[0600] E158. The dsRNA of any one of E110-E135, wherein the antisense strand consists of a nucleobase sequence of any one of SEQ ID NOs: 104, 372, 582, 634, 930, 934, 970, 1054, 1076, 1088, 1098, 1230, 1400, 1506, 1888, 2128, E2230, 2518, 2592, 2654, or 2844, wherein the 5′ nucleotide represented by U can be any nucleotide (e.g., U, A, C, G), and an overhang of 1-4 nucleotides.
[0601] E159. The dsRNA of any one of E110-E135, wherein the antisense strand consists of a nucleobase sequence of any one of SEQ ID NOs: 582, 934, 1076, 1088, 1098, 1230, 1400, 1506, 2230, or 2844, wherein the 5′ nucleotide represented by U can be any nucleotide (e.g., U, A, C, G), and an overhang of 1-4 nucleotides.
[0602] E160. The dsRNA of E136, wherein the sense strand comprises a nucleobase sequence of SEQ ID NO: 656.
[0603] E161. The dsRNA of E136, wherein the sense strand comprises a nucleobase sequence of SEQ ID NO: 636.
[0604] E162. The dsRNA of E136, wherein the sense strand comprises a nucleobase sequence of SEQ ID NO: 364.
[0605] E163. The dsRNA of E136, wherein the sense strand comprises a nucleobase sequence of SEQ ID NO: 648.
[0606] E164. The dsRNA of E136, wherein the sense strand comprises a nucleobase sequence of SEQ ID NO: E1366.
[0607] E165. The dsRNA of E136, wherein the sense strand comprises a nucleobase sequence of SEQ ID NO: 550.
[0608] E166. The dsRNA of E136, wherein the sense strand comprises a nucleobase sequence of SEQ ID NO: 1874.
[0609] E167. The dsRNA of E136, wherein the sense strand comprises a nucleobase sequence of SEQ ID NO: E1302.
[0610] E168. The dsRNA of E136, wherein the sense strand comprises a nucleobase sequence of SEQ ID NO: 420.
[0611] E169. The dsRNA of E136, wherein the sense strand comprises a nucleobase sequence of SEQ ID NO: 672.
[0612] E170. The dsRNA of E136, wherein the sense strand comprises a nucleobase sequence of SEQ ID NO: 832.
[0613] E171. The dsRNA of E148, wherein the antisense strand comprises a nucleobase sequence of SEQ ID NO: 649, wherein the 5′ nucleotide represented by U can be any nucleotide (e.g., U, A, C, G).
[0614] E172. The dsRNA of E148, wherein the antisense strand comprises a nucleobase sequence of SEQ ID NO: 657, wherein the 5′ nucleotide represented by U can be any nucleotide (e.g., U, A, C, G).
[0615] E173. The dsRNA of E148, wherein the antisense strand comprises a nucleobase sequence of SEQ ID NO: 637, wherein the 5′ nucleotide represented by U can be any nucleotide (e.g., U, A, C, G).
[0616] E174. The dsRNA of E148, wherein the antisense strand comprises a nucleobase sequence of SEQ ID NO: 365, wherein the 5′ nucleotide represented by U can be any nucleotide (e.g., U, A, C, G).
[0617] E175. The dsRNA of E148, wherein the antisense strand comprises a nucleobase sequence of SEQ ID NO: E1367, wherein the 5′ nucleotide represented by U can be any nucleotide (e.g., U, A, C, G).
[0618] E176. The dsRNA of E148, wherein the antisense strand comprises a nucleobase sequence of SEQ ID NO: 551, wherein the 5′ nucleotide represented by U can be any nucleotide (e.g., U, A, C, G).
[0619] E177. The dsRNA of E148, wherein the antisense strand comprises a nucleobase sequence of SEQ ID NO: 1875, wherein the 5′ nucleotide represented by U can be any nucleotide (e.g., U, A, C, G).
[0620] E178. The dsRNA of E148, wherein the antisense strand comprises a nucleobase sequence of SEQ ID NO: 1303, wherein the 5′ nucleotide represented by U can be any nucleotide (e.g., U, A, C, G).
[0621] E179. The dsRNA of E148, wherein the antisense strand comprises a nucleobase sequence of SEQ ID NO: 421, wherein the 5′ nucleotide represented by U can be any nucleotide (e.g., U, A, C, G).
[0622] E180. The dsRNA of E148, wherein the antisense strand comprises a nucleobase sequence of SEQ ID NO: 673, wherein the 5′ nucleotide represented by U can be any nucleotide (e.g., U, A, C, G).
[0623] E181. The dsRNA of E148, wherein the antisense strand comprises a nucleobase sequence of SEQ ID NO: 833, wherein the 5′ nucleotide represented by U can be any nucleotide (e.g., U, A, C, G).
[0624] E182. The dsRNA of any one of E110-E135, wherein the sense strand is any one of Sense Oligo Nos: 78, 82, 104, 148, 158, 160, 190, 240, 244, 246, 250, 252, 260, 308, 314, 316, 354, 356, 360, 362, 364, 368, 370, 372, 396, 414, 416, 418, 474, 476,478, 480, 502, 512, 552 558, 560, 582, 616, 618, 634, 636, 642, 646, 648, 656, 660, 690, 692, 718, 720, 722, 796, 820, 822, 826, 848, 852, 854, 900, 914, 928, 930, 934,936, 946, 948, 966, 970,972, 988, 990, 992, 994, 996, 1006, 1020, 1032, 1054, 1056, 1058, 1076, 1088, 1096, 1098, 1110, 1112, 1126, 1214, 1220, 1230, 1306, 1308, 1310, 1318, 1326, 1386, 1394, 1396, 1400, 1404, 1424, 1426, 1448, 1452, 1454, 1506, 1524, 1540, 1546, 1656, 1666, 1674, 1676, 1678, 1722, 1762, 1766, 1768, 1836, 1838, 1842, 1868, 1886, 1888, 1964, 1990, 2030, 2108, 2128, 2230, 2242, 2246, 2254, 2274, 2294, 2330, 2334, 2356, 2360, 2362, 2448, 2502, 2504, 2516, 2518, 2578, 2580, 2592, 2596, 2602, 2654, 2656, 2686, 2762, 2768, 2782, 2844, or 2846.
[0625] E183. The dsRNA of any one of E110-E135, wherein the sense strand is any one of Sense Oligo Nos: 362, 370, 372, 416, 582, 634, 930, 934, 970, 1054, 1076, 1088, 1096, 1098, 1126, 1220, 1230, 1400, 1506, 1666, 1766, 1888, 2128, 2230, 2330, 2334, 2448, 2504, 2516 2518, 2578, 2592, 2596, 2602, 2654, 2782, 2844, or 2846.
[0626] E184. The dsRNA of any one of E110-E135, wherein the sense strand is any one of Sense Oligo Nos: 104, 372, 582, 634, 930, 934, 970, 1054, 1076, 1088, 1098, 1230, 1400, 1506, 1888, 2128, 2230, 2518, 2592, 2654, or 2844.
[0627] E185. The dsRNA of any one of E110-E135, wherein the sense strand is any one of Sense Oligo Nos: 582, 934, 1076, 1088, 1098, 1230, 1400, 1506, 2230, or 2844.
[0628] E186. The dsRNA of any one of E110-E135, wherein the antisense strand is any one of Antisense Oligo Nos: 79, 83, 105, 149, 159, 161, 191, 241, 245, 247, 251, 253, 261, 309, 315, 317, 355, 357, 361, 363, 365, 369, 371, 373, 379, 415, 417, 419, 475, 477, 479, 481, 503, 513, 553, 559, 561, 583, 617, 619, 635, 637, 643, 647, 649, 657, 661, 691, 693, 719, 721, 723, 797, 821, 823, 827, 849, 853, 855, 901, 915, 929, 931, 935, 937, 947, 949, 967, 971, 973, 989, 991, 993, 995, 997, 1007, 1021, 1032, 1055, 1057, 1059, 1077, 1089, 1097, 1099, 1111, 1113, 1127, 1215, 1221, 1230, 1307, 1309, 1311, 1319, 1363, 1387, 1395, 1397, 1401, 1405, 1425, 1427, 1449, 1453, 1455, 1507, 1525, 1541, 1547, 1657, 1667, 1675, 1677, 1679, 1723, 1763, 1767, 1769, 1837, 1839, 1843, 1869, 1887, 1889, 1965, 1991, 2031, 2109, 2129, 2231, 2243, 2247, 2255, 2275, 2295, 2331, 2335, 2357, 2361, 2363, 2449, 2503, 2505, 2517, 2519, 2579, 2581, 2593, 2597, 2603, 2655, 2657, 2687, 2763, 2769, 2783, 2845, or 2847, wherein the 5′ nucleotide represented by U can be any nucleotide (e.g., U, A, C, G).
[0629] E187. The dsRNA of any one of E110-E135, wherein the antisense strand is any one of Antisense Oligo Nos: 104, 362, 370, 372, 416, 582, 634, 930, 934, 970, 1054, 1076, 1088, 1096, 1098, 1126, 1220, 1230, 1400, 1506, 1666, 1766, 1888, 2128, 2230, 2330, 2334, 2448, 2504, 2516, 2518, 2578, 2592, 2596, 2602, 2654, 2782, 2844, or 2846, wherein the 5′ nucleotide represented by U can be any nucleotide (e.g., U, A, C, G).
[0630] E188. The dsRNA of any one of E110-E135, wherein the antisense strand is any one of Antisense Oligo Nos: 104, 372, 582, 634, 930, 934, 970, 1054, 1076, 1088, 1098, 1230, 1400, 1506, 1888, 2128, 2230, 2518, 2592, 2654, or 2844, wherein the 5′ nucleotide represented by U can be any nucleotide (e.g., U, A, C, G).
[0631] E189. The dsRNA of any one of E110-E135, wherein the antisense strand is any one of Antisense Oligo Nos: 582, 934, 1076, 1088, 1098, 1230, 1400, 1506, 2230, or 2844, wherein the 5′ nucleotide represented by U can be any nucleotide (e.g., U, A, C, G).
[0632] E190. The dsRNA of E136, wherein the sense strand is Sense Oligo No: 656.
[0633] E191. The dsRNA of E136, wherein the sense strand is Sense Oligo No: 636.
[0634] E192. The dsRNA of E136, wherein the sense strand Sense Oligo No: 364.
[0635] E193. The dsRNA of E136, wherein the sense strand is Sense Oligo No: 648.
[0636] E194. The dsRNA of E136, wherein the sense strand is Sense Oligo No: 1366.
[0637] E195. The dsRNA of E136, wherein the sense strand is Sense Oligo No: 550.
[0638] E196. The dsRNA of E136, wherein the sense strand Sense Oligo No: 1874.
[0639] E197. The dsRNA of E136, wherein the sense strand Sense Oligo No: E1302.
[0640] E198. The dsRNA of E136, wherein the sense strand is Sense Oligo No: 420.
[0641] E199. The dsRNA of E135, wherein the sense strand Sense Oligo No: 672.
[0642] E200. The dsRNA of E136, wherein the sense strand is Sense Oligo No: 832.
[0643] E201. The dsRNA of E148, wherein the antisense strand is Antisense Oligo No: 649, wherein the 5′ nucleotide represented by U can be any nucleotide (e.g., U, A, C, G).
[0644] E202. The dsRNA of E148, wherein the antisense strand is Antisense Oligo No: 657, wherein the 5′ nucleotide represented by U can be any nucleotide (e.g., U, A, C, G).
[0645] E203. The dsRNA of E148, wherein the antisense strand is Antisense Oligo No: 637, wherein the 5′ nucleotide represented by U can be any nucleotide (e.g., U, A, C, G).
[0646] E204. The dsRNA of E148, wherein the antisense strand is Antisense Oligo No: 365, wherein the 5′ nucleotide represented by U can be any nucleotide (e.g., U, A, C, G).
[0647] E205. The dsRNA of E148, wherein the antisense strand is Antisense Oligo No: E1367, wherein the 5′ nucleotide represented by U can be any nucleotide (e.g., U, A, C, G).
[0648] E206. The dsRNA of E148, wherein the antisense strand is Antisense Oligo No: 551, wherein the 5′ nucleotide represented by U can be any nucleotide (e.g., U, A, C, G).
[0649] E207. The dsRNA of E148, wherein the antisense strand is Antisense Oligo No: 1875, wherein the 5′ nucleotide represented by U can be any nucleotide (e.g., U, A, C, G).
[0650] E208. The dsRNA of E148, wherein the antisense strand is Antisense Oligo No: 1303, wherein the 5′ nucleotide represented by U can be any nucleotide (e.g., U, A, C, G).
[0651] E209. The dsRNA of E148, wherein the antisense strand is Antisense Oligo No: 421, wherein the 5′ nucleotide represented by U can be any nucleotide (e.g., U, A, C, G).
[0652] E210. The dsRNA of E148, wherein the antisense strand is Antisense Oligo No: 673, wherein the 5′ nucleotide represented by U can be any nucleotide (e.g., U, A, C, G).
[0653] E211. The dsRNA of E148, wherein the antisense strand is Antisense Oligo No 833, wherein the 5′ nucleotide represented by U can be any nucleotide (e.g., U, A, C, G).
[0654] E212. The dsRNA of any one of E110-E211, wherein the dsRNA exhibits at least 50% mRNA inhibition at a 10 nM dsRNA concentration when determined using a cell assay compared with a control cell.
[0655] E213. The dsRNA of any one of E110-E211, wherein the dsRNA exhibits at least 60% mRNA inhibition at a 10 nM dsRNA concentration when determined using a cell assay compared with a control cell.
[0656] E214. The dsRNA of any one of E110-E211, wherein the dsRNA exhibits at least 70% mRNA inhibition at a 10 nM dsRNA concentration when determined using a cell assay when compared with a control cell.
[0657] E215. The dsRNA of any one of E110-E211, wherein the sense strand is complementary to at least 17 contiguous nucleotides of an MSH3 gene.
[0658] E216. The dsRNA of any one of E110-E211, wherein the sense strand is complementary to at least 19 contiguous nucleotides of an MSH3 gene.
[0659] E217. The dsRNA of any one of E110-E211, wherein the antisense strand is complementary to 17 contiguous nucleotides of an MSH3 gene.
[0660] E218. The dsRNA of any one of E110-E211, wherein the antisense strand is complementary to at least 19 contiguous nucleotides of an MSH3 gene.
[0661] E219. The dsRNA of any one of E110-E211, wherein the antisense strand and/or the sense strand comprises a 3′ overhang of at least 1 linked nucleoside; or a 3′ overhang of at least 2 linked nucleosides.
[0662] E220. A pharmaceutical composition comprising one or more dsRNAs of any one of E110-E219 and a pharmaceutically acceptable carrier.
[0663] E221. A composition comprising one or more dsRNAs of any one of E110-E219 and a lipid nanoparticle, a polyplex nanoparticle, a lipoplex nanoparticle, or a liposome.
[0664] E222. A vector encoding at least one strand of the dsRNA of any one of E110-E219.
[0665] E223. A cell comprising the vector of E222.
[0666] E224. A method of reducing transcription of MSH3 in a cell, the method comprising contacting the cell with the dsRNA of any one of E110-E219, the pharmaceutical composition of E220, the composition of E221, the vector of E222, or the cell of E223 for a time sufficient to obtain degradation of an mRNA transcript of MSH3, thereby reducing expression of MSH3 in the cell.
[0667] E225. A method of treating, preventing, or delaying progression of a nucleotide repeat expansion disorder in a subject in need thereof, the method comprising administering to the subject the dsRNA of any one of E110-E219, the pharmaceutical composition of E220, the composition of E221, the vector of E222, or the cell of E223.
[0668] E226. A method of reducing the level and/or activity of MSH3 in a cell of a subject identified as having a nucleotide repeat expansion disorder, the method comprising contacting the cell with the dsRNA of any one of E of any one of E110-E219, the pharmaceutical composition of E220, the composition of E221, the vector of E222, or the cell of E223.
[0669] E227. A method for reducing expression of MSH3 in a cell comprising contacting the cell with the dsRNA of any one of E of any one of E110-E219, the pharmaceutical composition of E220, the composition of E221, the vector of E222, or the cell of E223 and maintaining the cell for a time sufficient to obtain degradation of an mRNA transcript of MSH3, thereby reducing expression of MSH3 in the cell.

[0670] 228. A method of decreasing nucleotide repeat expansion in a cell, the method comprising contacting the cell with the dsRNA of any one of E of any one of E110-E219, the pharmaceutical composition of E220, the composition of E221, the vector of E222, or the cell of E223.
[0671] E229. The method of any one of E224-E228, wherein the cell is in a subject.
[0672] E230. The method of any one of E224-E229, wherein the subject is a human.
[0673] E231. The method of any one of E224-E230, wherein the cell is a cell of the central nervous system or a muscle cell
[0674] E232. The method of any one of E225-E226 or E229-E231, wherein the subject is identified as having a nucleotide repeat expansion disorder.
[0675] E233. The method of any one of E232, wherein the subject is identified as having a trinucleotide repeat expansion disorder.
[0676] E234. The method of E233, wherein the trinucleotide repeat expansion disorder is a polyglutamine disease.
[0677] E235. The method of E234, wherein the polyglutamine disease is selected from the group consisting of dentatorubropallidoluysian atrophy, Huntington's disease, spinal and bulbar muscular atrophy, spinocerebellar ataxia type 1, spinocerebellar ataxia type 2, spinocerebellar ataxia type 3, spinocerebellar ataxia type 6, spinocerebellar ataxia type 7, spinocerebellar ataxia type 17, and Huntington's disease-like 2.
[0678] E236. The method of E233, wherein the trinucleotide repeat expansion disorder is a non-polyglutamine disease.
[0679] E237. The method of E236, wherein the non-polyglutamine disease is selected from the group consisting of fragile X syndrome, fragile X-associated tremor/ataxia syndrome, fragile XE mental retardation, Friedreich's ataxia, myotonic dystrophy type 1, spinocerebellar ataxia type 8, spinocerebellar ataxia type 12, oculopharyngeal muscular dystrophy, Fragile X-associated premature ovarian failure, FRA2A syndrome, FRA7A syndrome, and early infantile epileptic encephalopathy.
[0680] E238. A dsRNA of any one of E of any one of E110-E219, the pharmaceutical composition of E220, the composition of E221, the vector of E222, or the cell of E223, for use in prevention or treatment of a nucleotide repeat expansion disorder.
[0681] E239. The dsRNA of E238, wherein the nucleotide repeat expansion disorder is a trinucleotide repeat expansion disorder.
[0682] E240. The dsRNA, the pharmaceutical composition, the composition, the vector, or the cell of E238 or E239, wherein the nucleotide repeat expansion disorder is selected from the group consisting of dentatorubropallidoluysian atrophy, Huntington's disease, spinal and bulbar muscular atrophy, spinocerebellar ataxia type 1, spinocerebellar ataxia type 2, spinocerebellar ataxia type 3, spinocerebellar ataxia type 6, spinocerebellar ataxia type 7, spinocerebellar ataxia type 17, Huntington's disease-like 2, fragile X syndrome, fragile X-associated tremor/ataxia syndrome, fragile XE mental retardation, Friedreich's ataxia, myotonic dystrophy type 1, spinocerebellar ataxia type 8, spinocerebellar ataxia type 12, oculopharyngeal muscular dystrophy, Fragile X-associated premature ovarian failure, FRA2A syndrome, FRA7A syndrome, and early infantile epileptic encephalopathy.
[0683] E241. The dsRNA, the pharmaceutical composition, the composition, the vector, or the cell of E238 or E239, wherein the trinucleotide repeat expansion disorder is Huntington's disease.
[0684] E242. The dsRNA, the pharmaceutical composition, the composition, the vector, or the cell of E238 or E239, wherein the trinucleotide repeat expansion disorder is Friedreich's ataxia.
[0685] E243. The dsRNA, the pharmaceutical composition, the composition, the vector, or the cell of E238 or E239, wherein the trinucleotide repeat expansion disorder is myotonic dystrophy type 1.
[0686] E244. The dsRNA, the pharmaceutical composition, the composition, the vector, or the cell of any of E238 or E239, wherein the dsRNA, pharmaceutical composition, composition, vector, or cell is administered intrathecally.
[0687] E245. The dsRNA, the pharmaceutical composition, the composition, the vector, or the cell of any of E238 or E239, wherein the dsRNA, pharmaceutical composition, composition, vector, or cell is administered intraventricularly.
[0688] E246. The dsRNA, the pharmaceutical composition, the composition, the vector, or the cell of any of E238 or E239, wherein the dsRNA, pharmaceutical composition, composition, vector, or cell is administered intramuscularly.
[0689] E247. The dsRNA, the pharmaceutical composition, the composition, the vector, or the cell of any of E238 or E239, wherein the dsRNA, pharmaceutical composition, composition, vector, or cell is administered intracerebroventricularly.
[0690] E248. The dsRNA, the pharmaceutical composition, the composition, the vector, or the cell of any of E238 or E239, wherein the dsRNA, pharmaceutical composition, composition, vector, or cell is administered intraocularly.
[0691] E249. A method of treating, preventing, or delaying progression of a disorder in a subject in need thereof wherein the subject is suffering from trinucleotide repeat expansion disorder, comprising administering to said subject the dsRNA of any one of any one of E110-E219, the pharmaceutical composition of E220, the composition of E221, the vector of E222, or the cell of E223.
[0692] E250. The method of E249, further comprising administering at least one additional therapeutic agent.
[0693] E251. The method of E250, wherein at least one additional therapeutic agent is an antisense oligonucleotide that hybridizes to an mRNA encoding the Huntingtin gene.
[0694] E252. A method of preventing or delaying progression of a trinucleotide repeat expansion disorder in a subject, the method comprising administering to the subject the dsRNA of any one of s E110-E219, the pharmaceutical composition of E220, the composition of E221, the vector of 222, or the cell of E223 in an amount effective to delay progression of a nucleotide repeat expansion disorder of the subject.
[0695] E253. The method of E252, wherein the nucleotide repeat expansion disorder is a trinucleotide repeat expansion disorder.
[0696] E254. The method of E253, wherein the trinucleotide repeat expansion disorder is selected from the group consisting of dentatorubropallidoluysian atrophy, Huntington's disease, spinal and bulbar muscular atrophy, spinocerebellar ataxia type 1, spinocerebellar ataxia type 2, spinocerebellar ataxia type 3, spinocerebellar ataxia type 6, spinocerebellar ataxia type 7, spinocerebellar ataxia type 17, Huntington's disease-like 2, fragile X syndrome, fragile X-associated tremor/ataxia syndrome, fragile XE mental retardation, Friedreich's ataxia, myotonic dystrophy type 1, spinocerebellar ataxia type 8, spinocerebellar ataxia type 12, oculopharyngeal muscular dystrophy, Fragile X-associated premature ovarian failure, FRA2A syndrome, FRA7A syndrome, and early infantile epileptic encephalopathy.
[0697] E255. The method of E253 or E254, wherein the trinucleotide repeat expansion disorder is Huntington's disease.
[0698] E256. The method of E253 or E254, wherein the trinucleotide repeat expansion disorder is Friedrich's ataxia.
[0699] E257. The method of E253 or E254, wherein the trinucleotide repeat expansion disorder is myotonic dystrophy type 1.
[0700] E258. The method of E253 or E254, wherein the trinucleotide repeat expansion disorder is a Spinocerebellar ataxia (SCA).
[0701] E259. The method of E258, wherein the SCA is Spinocerebellar ataxia type 1 (SCA1).
[0702] E260. The method of E258, wherein the SCA is Spinocerebellar ataxia type 10 (SCA10).
[0703] E261. The method of E258, wherein the SCA is Spinocerebellar ataxia type 12 (SCA12).
[0704] E262. The method of E258, wherein the SCA is Spinocerebellar ataxia type 17 (SCA17).
[0705] E263. The method of E258, wherein the SCA is Spinocerebellar ataxia type 2 (SCA2).
[0706] E264. The method of E258, wherein the SCA is Spinocerebellar ataxia type 3 (SCA3)/Machado-Joseph Disease.
[0707] E265. The method of E258, wherein the SCA is Spinocerebellar ataxia type 45 (SCA45).
[0708] E266. The method of E258, wherein the SCA is Spinocerebellar ataxia type 6 (SCA6).
[0709] E267. The method of E258, wherein the SCA is Spinocerebellar ataxia type 7 (SCA7).
[0710] E268. The method of E258, wherein the SCA is Spinocerebellar ataxia type 8 (SCA8).
[0711] E269. The method of any of E249-E268, further comprising administering at least one additional therapeutic agent.
[0712] E270. The method of 269, wherein at least one additional therapeutic agent is an antisense oligonucleotide that hybridizes to an mRNA encoding the Huntingtin gene.
[0713] E271. The method of any of E249-E270, wherein progression of the trinucleotide repeat expansion disorder is delayed by at least 120 days, for example, at least 6 months, at least 12 months, at least 2 years, at least 3 years, at least 4 years, at least 5 years, at least 10 years or more, when compared with a predicted progression.
[0714] E272. A dsRNA of any one of E110-E219, the pharmaceutical composition of E220, the composition of E221, the vector of E222, or the cell of E223, for use in preventing or delaying progression of a nucleotide repeat expansion disorder in a subject
[0715] E272. The dsRNA of E272, wherein the nucleotide repeat expansion disorder is a trinucleotide repeat expansion disorder.
[0716] E274. The dsRNA, the pharmaceutical composition, the composition, the vector, or the cell for use of E272 or E273, wherein the trinucleotide repeat expansion disorder is selected from the group consisting of dentatorubropallidoluysian atrophy, Huntington's disease, spinal and bulbar muscular atrophy, spinocerebellar ataxia type 1, spinocerebellar ataxia type 2, spinocerebellar ataxia type 3, spinocerebellar ataxia type 6, spinocerebellar ataxia type 7, spinocerebellar ataxia type 17, Huntington's disease-like 2, fragile X syndrome, fragile X-associated tremor/ataxia syndrome, fragile XE mental retardation, Friedreich's ataxia, myotonic dystrophy type 1, spinocerebellar ataxia type 8, spinocerebellar ataxia type 12, oculopharyngeal muscular dystrophy, Fragile X-associated premature ovarian failure, FRA2A syndrome, FRA7A syndrome, and early infantile epileptic encephalopathy.
[0717] E275. The dsRNA, the pharmaceutical composition, the composition, the vector, or the cell of E273 or E274, wherein the trinucleotide repeat expansion disorder is Huntington's disease.
[0718] E276. The dsRNA, the pharmaceutical composition, the composition, the vector, or the cell of E273 or E274, wherein the trinucleotide repeat expansion disorder is Friedrich's ataxia.
[0719] E277. The dsRNA, the pharmaceutical composition, the composition, the vector, or the cell of E273 or E274, wherein the trinucleotide repeat expansion disorder is myotonic dystrophy type 1
[0720] E278. The dsRNA, the pharmaceutical composition, the composition, the vector, or the cell of 273 or 274, wherein the trinucleotide repeat expansion disorder is a Spinocerebellar ataxia (SCA).
[0721] E279. The dsRNA of E278, wherein the SCA is Spinocerebellar ataxia type 1 (SCA1).
[0722] E280. The dsRNA of E278, wherein the SCA is Spinocerebellar ataxia type 10 (SCA10).
[0723] E281. The dsRNA of E278, wherein the SCA is Spinocerebellar ataxia type 12 (SCA12).
[0724] E282. The dsRNA of E278, wherein the SCA is Spinocerebellar ataxia type 17 (SCA17).
[0725] E283. The dsRNA of E278, wherein the SCA is Spinocerebellar ataxia type 2 (SCA2).
[0726] E284. The dsRNA of E278, wherein the SCA is Spinocerebellar ataxia type 3 (SCA3)/Machado-Joseph Disease.
[0727] E285. The dsRNA of E278, wherein the SCA is Spinocerebellar ataxia type 45 (SCA45).
[0728] E286. The dsRNA of E278, wherein the SCA is Spinocerebellar ataxia type 6 (SCA6).
[0729] E287. The dsRNA of E278, wherein the SCA is Spinocerebellar ataxia type 7 (SCAT).
[0730] E288. The dsRNA of E278, wherein the SCA is Spinocerebellar ataxia type 8 (SCAB).
[0731] E289. The dsRNA, the pharmaceutical composition, the composition, the vector, or the cell of any one of E272-E288, wherein progression of the trinucleotide repeat expansion disorder is delayed by at least 120 days, for example, at least 6 months, at least 12 months, at least 2 years, at least 3 years, at least 4 years, at least 5 years, at least 10 years or more, when compared with a predicted progression.

The application's sequence listing, which the Patent Office published only in electronic form, follows.

SEQUENCE LISTING (2873 sequences)

SEQ ID NO: 1 - DNA, 4472 bp, Homo Sapiens
ccgcagacgcctgggaactgcggccgcgggctcgcgctcctcgccaggccctgccgccgggctgccatccttgccctgccatgtctcgccggaagcctgcgtcgggcggcctcgctgcctccagctcagcccctgcgaggcaagcggttttgagccgattcttccagtctacgggaagcctgaaatccacctcctcctccacaggtgcagccgaccaggtggaccctggcgctgcagcggctgcagcggccgcagcggccgcagcgcccccagcgcccccagctcccgccttcccgccccagctgccgccgcacatagctacagaaattgacagaagaaagaagagaccattggaaaatgatgggcctgttaaaaagaaagtaaagaaagtccaacaaaaggaaggaggaagtgatctgggaatgtctggcaactctgagccaaagaaatgtctgaggaccaggaatgtttcaaagtctctggaaaaattgaaagaattctgctgcgattctgcccttcctcaaagtagagtccagacagaatctctgcaggagagatttgcagttctgccaaaatgtactgattttgatgatatcagtcttctacacgcaaagaatgcagtttcttctgaagattcgaaacgtcaaattaatcaaaaggacacaacactttttgatctcagtcagtttggatcatcaaatacaagtcatgaaaatttacagaaaactgcttccaaatcagctaacaaacggtccaaaagcatctatacgccgctagaattacaatacatagaaatgaagcagcagcacaaagatgcagttttgtgtgtggaatgtggatataagtatagattctttggggaagatgcagagattgcagcccgagagctcaatatttattgccatttagatcacaactttatgacagcaagtatacctactcacagactgtttgttcatgtacgccgcctggtggcaaaaggatataaggtgggagttgtgaagcaaactgaaactgcagcattaaaggccattggagacaacagaagttcactcttttcccggaaattgactgccctttatacaaaatctacacttattggagaagatgtgaatcccctaatcaagctggatgatgctgtaaatgttgatgagataatgactgatacttctaccagctatcttctgtgcatctctgaaaataaggaaaatgttagggacaaaaaaaagggcaacatttttattggcattgtgggagtgcagcctgccacaggcgaggttgtgtttgatagtttccaggactctgcttctcgttcagagctagaaacccggatgtcaagcctgcagccagtagagctgctgcttccttcggccttgtccgagcaaacagaggcgctcatccacagagccacatctgttagtgtgcaggatgacagaattcgagtcgaaaggatggataacatttattttgaatacagccatgctttccaggcagttacagagttttatgcaaaagatacagttgacatcaaaggttctcaaattatttctggcattgttaacttagagaagcctgtgatttgctctttggctgccatcataaaatacctcaaagaattcaacttggaaaagatgctctccaaacctgagaattttaaacagctatcaagtaaaatggaatttatgacaattaatggaacaacattaaggaatctggaaatcctacagaatcagactgatatgaaaaccaaaggaagtttgctgtgggttttagaccacactaaaacttcatttgggagacggaagttaaagaagtgggtgacccagccactccttaaattaagggaaataaatgcccggcttgatgctgtatcggaagttctccattcagaatctagtgtgtttggtcagatagaaaatcatctacgtaaattgcccgacatagagaggggactctgtagcatttatcacaaaaaatgttctacccaagagttcttcttgattgtcaaaactttatatcacctaaagtcagaatttcaagcaataatacctgctgttaattcccacattcagtcagacttgctccggaccgttattttagaaattcctgaactcctcagtccagtggagcattacttaaagatactcaatgaacaagctgccaaagttggggataaaactgaattatttaaagacctttctgacttccctttaataaaaaagaggaaggatgaaattcaaggtgttattgacgagatccgaatgcatttgcaagaaatacgaaaaatactaaaaaatccttctgcacaatatgtgacagtatcaggacaggagtttatgatagaaataaagaactctgctgtatcttgtataccaactgattgggtaaaggttggaagcacaaaagctgtgagccgctttcactctccttttattgtagaaaattacagacatctgaatcagctccgggagcagctagtccttgactgcagtgctgaatggcttgattttctagagaaattcagtgaacattatcactccttgtgtaaagcagtgcatcacctagcaactgttgactgcattttctccctggccaaggtcgctaagcaaggagattactgcagaccaactgtacaagaagaaagaaaaattgtaataaaaaatggaaggcaccctgtgattgatgtgttgctgggagaacaggatcaatatgtcccaaataatacagatttatcagaggactcagagagagtaatgataattaccggaccaaacatgggtggaaagagctcctacataaaacaagttgcattgattaccatcatggctcagattggctcctatgttcctgcagaagaagcgacaattgggattgtggatggcattttcacaaggatgggtgctgcagacaatatatataaaggacagagtacatttatggaagaactgactgacacagcagaaataatcagaaaagcaacatcacagtccttggttatcttggatgaactaggaagagggacgagcactcatgatggaattgccattgcctatgctacacttgagtatttcatcagagatgtgaaatccttaaccctgtttgtcacccattatccgccagtttgtgaactagaaaaaaattactcacaccaggtggggaattaccacatgggattcttggtcagtgaggatgaaagcaaactggatccaggcgcagcagaacaagtccctgattttgtcaccttcctttaccaaataactagaggaattgcagcaaggagttatggattaaatgtggctaaactagcagatgttcctggagaaattttgaagaaagcagctcacaagtcaaaagagctggaaggattaataaatacgaaaagaaagagactcaagtattttgcaaagttatggacgatgcataatgcacaagacctgcagaagtggacagaggagttcaacatggaagaaacacagacttctcttcttcattaaaatgaagactacatttgtgaacaaaaaatggagaattaaaaataccaactgtacaaaataactctccagtaacagcctatctttgtgtgacatgtgagcataaaattatgaccatggtatattcctattggaaacagagaggtttttctgaagacagtctttttcaagtttctgtcttcctaacttttctacgtataaacactcttgaatagacttccactttgtaattagaaaattttatggacagtaagtccagtaaagccttaagtggcagaatataattcccaagcttttggagggtgatataaaaatttacttgatatttttatttgtttcagttcagataattggcaactgggtgaatctggcaggaatctatccattgaactaaaataattttattatgcaaccagtttatccaccaagaacataagaattttttataagtagaaagaattggccaggcatggtggctcatgcctgtaatcccagcactttgggaggccaaggtaggcagatcacctgaggtcaggagttcaagaccagcctggccaacatggcaaaaccccatctttactaaaaatataaagtacatctctactaaaaatacgaaaaaattagctgggcatggtggcgcacacctgtagtcccagctactccggaggctgaggcaggagaatctcttgaacctgggaggcggaggttgcaatgagccgagatcacgtcactgcactccagcttgggcaacagagcaagactccatctcaaaaaaaaaaaaagaaaaaagaaaagaaatagaattatcaagcttttaaaaactagagcacagaaggaataaggtcatgaaatttaaaaggttaaatattgtcataggattaagcagtttaaagattgttggatgaaattatttgtcattcattcaagtaataaatatttaatgaatacttgctataaaaaaaaaaaaaaaaaaaaaaaaaa

SEQ ID NO: 2 - protein, 1137 aa, Homo sapiens
MSRRKPASGGLAASSSAPARQAVLSRFFQSTGSLKSTSSSTGAADQVDPGAAAAAAAAAAAAPPAPPAPAFPPQLPPHIATEIDRRKKRPLENDGPVKKKVKKVQQKEGGSDLGMSGNSEPKKCLRTRNVSKSLEKLKEFCCDSALPQSRVQTESLQERFAVLPKCTDFDDISLLHAKNAVSSEDSKRQINQKDTTLFDLSQFGSSNTSHENLQKTASKSANKRSKSIYTPLELQYIEMKQQHKDAVLCVECGYKYRFFGEDAEIAARELNIYCHLDHNFMTASIPTHRLFVHVRRLVAKGYKVGVVKQTETAALKAIGDNRSSLFSRKLTALYTKSTLIGEDVNPLIKLDDAVNVDEIMTDTSTSYLLCISENKENVRDKKKGNIFIGIVGVQPATGEVVFDSFQDSASRSELETRMSSLQPVELLLPSALSEQTEALIHRATSVSVQDDRIRVERMDNIYFEYSHAFQAVTEFYAKDTVDIKGSQIISGIVNLEKPVICSLAAIIKYLKEFNLEKMLSKPENFKQLSSKMEFMTINGTTLRNLEILQNQTDMKTKGSLLWVLDHTKTSFGRRKLKKWVTQPLLKLREINARLDAVSEVLHSESSVFGQIENHLRKLPDIERGLCSIYHKKCSTQEFFLIVKTLYHLKSEFQAIIPAVNSHIQSDLLRTVILEIPELLSPVEHYLKILNEQAAKVGDKTELFKDLSDFPLIKKRKDEIQGVIDEIRMHLQEIRKILKNPSAQYVTVSGQEFMIEIKNSAVSCIPTDWVKVGSTKAVSRFHSPFIVENYRHLNQLREQLVLDCSAEWLDFLEKFSEHYHSLCKAVHHLATVDCIFSLAKVAKQGDYCRPTVQEERKIVIKNGRHPVIDVLLGEQDQYVPNNTDLSEDSERVMIITGPNMGGKSSYIKQVALITIMAQIGSYVPAEEATIGIVDGIFTRMGAADNIYKGQSTFMEELTDTAEIIRKATSQSLVILDELGRGTSTHDGIAIAYATLEYFIRDVKSLTLFVTHYPPVCELEKNYSHQVGNYHMGFLVSEDESKLDPGAAEQVPDFVTFLYQITRGIAARSYGLNVAKLADVPGEILKKAAHKSKELEGLINTKRKRLKYFAKLWTMHNAQDLQKWTEEFNMEETQTSLLH

SEQ ID NO: 3 - DNA, 3945 bp, Mus musculus
ccaaggccggtcccgcacaggttgaggcgtgcgcgcgcgcaggcgcgagaaagtgcggccgcgcgctcgcgctcctagcaggccggctcttctgcacactgcaatgccccgcgggaaatccgcgtcgggaggctctactgccgccggcccaggcccggggaggcaaacggttctaagccggttcttcaggtctgcgggaagcctaagatccagcgcgtcctccacggagccagcagagaaggtgacagaaggtgacagcaggaagaggtcactgggaaatggtgggcccactaagaaaaaagcaaggaaagttccagagaaggaggaagaaaacatctcagtagcagctcaccaccctgaggcaaagaaatgtctgaggcccaggattgttttaaagtccctggaaaagttgaaagaattctgctgtgattctgccctccctcaaaacagagtccagacagaagctcttcgggagagacttgaagttctgccaaggtgtactgattttgaagatatcactctgcaacgtgcaaagaatgcggttttgtccgaagattccaaatctcaggctaatcagaaagacagtcaatttggaccctgccctgaagttttccagaagacttccgattgtaaaccttttaacaagcgatccaagagcgtctatacaccgttagaactgcagtacttagatatgaagcagcagcataaagacgcagttttgtgtgtggagtgtggttacaagtacagattctttggggaagatgcagaaattgctgcccgggaactcaatatttattgccacttagaccacaactttatgactgcaagcatacctacccacagactgttcgtgcatgtccgccgacttgtggccaaagggtacaaggtgggagttgtgaagcaaactgaaactgccgcattaaaggccatcggagacaataaaagttctgtcttctcccggaaattgaccgctctttatacgaaatccacacttattggtgaagatgtgaatcctctcatcaggctggatgattctgtaaatatcgatgaggtaatgacagatacatctaccaactatcttctgtgtatctacgaagaaaaggagaacattaaagacaaaaagaaggggaacctttccgttggtatcgtgggagtgcagcccgcaactggcgaggttgtgtttgactgcttccaggactctgcttccagactggagctggagactcgcatatcaagcctgcagcctgtggaattactgcttccctccgacctgtctgtgccaacagagatgctcatccaaagagccaccaatgtcagtgtgcgggatgacaggattcgagtagaaaggatgaataatacttactttgaatacagccatgctttccagacagttacggagttttatgctagagagatagttgacagccagggctctcagagtctctctggtgtcattaacttggagaagcctgtgatctgcgccttggctgccgtaataaggtacctcaaggaatttaacctggaaaagatgctgtccaaacccgagagttttaaacagctgtcaagtggaatggaattcatgagaattaatgggaccacgctaaggaatctggagatccttcagaatcagactgatatgaagaccaaaggaagcttgctttgggttttagaccacactaaaacttcatttgggagaaggaagttaaagaattgggttacccagccactgcttaaattaagggaaataaatgcccgacttgatgcagtatctgatgttctccactcagaatccagtgtgtttgagcagatagaaaaccttcttcgtaagttaccggatgtcgagagaggactatgtagcatttatcacaagaagtgctctacccaagagttcttcttgatcgtcaaaagcctatgtcaactgaagtcagagcttcaagcattaatgcctgctgttaattcccacgttcagtccgacttactccgagcactcatcgtggaggctcctgagctcctcagcccagtggaacattacttaaaggttctgaatgggccagctgccaaagttggcgataaaactgaattattcaaagacctctctgacttccctttaataaaaaagaggaaaaatgaaattcaggaagtcattcacagcatccaaatgcgtttacaggaatttcggaaaatattaaaacttccttctttacagtatgtgactgtatcaggacaagagtttatgattgaaataaagaactcggctgtatcttgcatcccagctgattgggtgaaggttggaagcacaaaagctgtgagccgctttcaccctcccttcatcgtggaaagctacagacgtctgaatcagctccgggagcagctagtccttgactgcaatgctgaatggcttggcttcctagagaattttggtgaacattatcacactttgtgtaaggctgtggatcacctagcaactgttgactgtattttctccctggccaaggtcgctaaacaaggaaattactgcaggccaactctacaagaagaaaagaagatcatcataaaaaatggaaggcaccctatgattgatgtgttgctgggtgaacaagatcagtttgtgcccaacagtacgagtttatcacaggactcggagagagtaatgataatcaccggaccaaacatgggtgggaaaagctcctacataaaacaggttgcactggttaccatcatggctcagattggctcctacgtccctgcagaggaagccacaattgggattgtggatggcattttcacaaggatgggtgctgcagacaatatatacaaaggccggagtactttcatggaagaactgacggacacagcggaaataatcaggagagcgtccccacagtccttggttatcctggatgagctggggagagggacaagcacccatgacggaatcgccatcgcctatgcaactctagagtattttatcagagacgtgaaatccttaacactgttcgttacccactatccaccagtctgtgaactagaaaaatgttacccagaacaagtggggaattaccacatgggattcttggtcaatgaagatgaaagcaagcaggactcaggtgacatggagcagatgccggattctgtcacttttctctatcagataacccgaggaattgcagcgagaagttatggacttaatgtggcgaagttagcagatgtacctagagaagtcttacagaaagccgcgcacaagtctaaggagctggaaggcttagtcagcctgagaaggaaaaggcttgaatgttttaccgacttatggacgacacacagtgtgaaggacctgcacacatgggcagataagctggaaatggaggaaatacagacttctctcccacattaaaatgaaaactgcatttttggagtaaaatacagagaactgaagattcaaactgtacaaaacaactctgtggcaacagccgtctctgtggtcttccttttgagatggcttctgctctgtgaagggagcttttcaggctcttgtcctcctgctttcagaagaaaaagacaatggagtgtaaaggcctcaattttcctaggcagtacatttcataccaaagcgggttcttctaagtaaaacctaaaacggaggttcttggtgcctacattatcagaggggcagtgcctatttaggttcagacaattgacaacaggctaatctgacaggaacctacttttgtgagaactaaagaactttataatgccagggtttgctcaccaaacacataaacgtttttatgagaaggagaatcgcgaagcttctagaagccagagcacaggaaggaaaggccacatgaagtgtgaagggctaaatgtcgtcatctttttaacagcttgaaggttggtgtataaaattattttgtcatttacttaaataaaaatatggaatgaatactt

SEQ ID NO: 4 - DNA, 3780 bp, Rattus norvegicus
atgccccgcaggaaatccgcgtcgggaggctctaatgccgccggcccagacccggggaggcaagtggttctgagccggttcttcaagtctgcgggaagcctaagatccagcgtgtcccccacagaaccagcagagaaggtgacagaaggtgacagcaggaagaggtcactggggaatggtgagcccactaacaagaaagcaaagaaagttccagaggaggaaggagaaaatacctcagtagcatctcacaatcctgagccaaagaaatgtctgaggcccaggattgtttcaaagtccctggaaaagttgaaagaattctgctgtgattctgccctccctcaaaacagagtccagacagaagccctttgggagagacttgcagttctgccaaagtgtactgatttcgaagatatcactctgcaacgtgcaaagaatgcggttttgtccgaagattccaagtctcaggctaatcagaaagacactcaatttggaccttcccctgaagctttccagaagacttccacttgtaaaccttttaacaggcggtccaagagcatctatactccactagaactgcagtaccttgatgtgaagcagctgcataaagacgcggttttgtgtgtggaatgtgggtacaagtacaggttctttggggaagatgcagaaattgctgcccgggaactcaatatttattgccacttggaccacaactttatgacggcgagcatacccacccacagactgttcgtgcatgtccgccgactggtggccaaaggatacaaggtgggagttgtgaagcaaactgaaactgcggcattaaaggccattggagacaataaaagttctgtcttttcccggaaattgactgctctttatacgaaatccacactgattggagaagatgtgaatcctctgatcaggctggatgattctgtaaatattgatgaggcagtgacggatacttctaccaactatcttctgtgtatctacgaagaaaaggaaaacattaaagacaaaaagaaggggaacatttcttttggcatcgtgggagtgcagcctgcgacgggcgaggtcgtgttcgactgcttccaggactcggcttccagactggagctggagactcgaacagcaagcctgcagcccgtggagctgctgctcccctcacagctgtccgagccaacggagatgctcatccgtagagccaccgctgtcagtgttggggatgacagaattcgagtagaaaggatgaataatactcactttgaatacagccatgctttccagacagttatggagttctatgccagagagacagttgacacccagggctctcagagcctgtctggtgtcattcacttggagaagcctgtgatctgcgccctggctgccataatacggtacctcaaggaatttaacttggacaaggtgctgtccaaacccgagaattttaaacagctgtcaagtggaatggaattcatgagaatcaatggaacaacgctaaggaatctggaaatcctacagaatcagactgatatgaagaccagaggaagtttgctttgggttttagaccacactaaaacctcatttgggagaaggaagttaaaaaaatgggttacccaaccattgcttaaattaagggacataaatgcccgacttgatgcaatatccgatgttctccactcagaatccagtgtgtttgaacagatagaaaaccttctacggaaactaccggatgtcgagagaggactgtgtagcatttatcacaagaagtgctctactcaggagttcttcttgatcgtcaaaaacctgtgtcaactcaaatcagagcttcaagcgttaatgcctgctgttaattcccacgtacagtcagacttgctccgagcacgcgtcttagaagtgcctgagctcctcagtccagtggagccttatttaaaggttctgaatgaacaagctgccaaagctggcgataaaactgaattattcaaagacctctctgacttccctttaataaaaaagaggaaaaatgaaattcaagaagtcattcacagcatccaaatgcatttacaagaattgcgaaaaatattaaaacttccttctttacaatatgtgactgtatcaggacaagagtttatggttgaaataaagaactcagctgtgtcttgcgtcccgactgactgggtgaaggttggaagcacaaaagctgtgagccgctttcactctccttttgtcgtggaaaactacagacgtctgaatcaactccgggagcagctagtccttgactgcaatgctgaatggcttgactttctagagaattttggtgaacattaccacactttgtgtaaggccgtggatcacctagcaactgtggactgcattttctccctggccaaggtcgccaagcaaggaagttactgcaggccaactctacaagaagaaaagaaaatcatcataaaaaatggaaggcaccctatgattgatgtgttgctgggtgaacaagatcagtttgtgcccaacagtacaaatttatcacaggactctgagagagtaatgataatcaccggaccgaacatgggtggcaagagctcctacataaaacaggttgctctggttgtgatcatggctcagatcggctcctacgttcctgcagaggaagccacaattgggattgtggacggcattttcacaaggaggggtgctgcagacaatatatacaaaggccggagtactttcatggaagagctgacagacacggcggagataatccagaaagcaacacagcggtccctggttatcctggacgagctgggaagagggaccagcacccacgacggaatcgccattgcctatgcgactctagagtattttatcagagacgtgaaatccttaaccctgttcgtcacccactatccaccagtctgtgaactagagaaacgttacccagagcaggtggggaattaccacatgggcttcttggtcaatgaggacggaagcaagcaggactcaggtgacatggagcagatgccggactctgtcactttcctctatcagataaccagaggaattgcagcgaggagttacggactgaatgtggcgaagctagcagatgtgcccagagaaatcttacagaaagctgctcacaagtctaaagagctggaaggcttagtcaatctgagaaggaaaagacttgaatattttatagatctgtggacgacacatagtgtaaaggacctgcacacgcgggcagctgagctggaaatacaggaaatacagacgtctccccacaatgaaatgaaaactacacttttggagctgaagtagcactgtatgatcatgcgagccagtggccgactggagatacaaactgaacaaacagctttgaggtagcagctgtcagtggcgtgagcacggaggaagagcgacgtcttccctttgagctggttccttctctgtgaagggggagcttttcaggctctcgtcctccgcactcggtgcctgcacagccagagcggcagtgtcatttccgctcagacagctgaccgcagggtaacctgacagggatcttttgtgagaactgaagattttataatgctagcggtttgttcaccaaagccatgagcatttttatgaggagtagaatcatgaagcttctagaatccagagcacagggaggaaacagccatatgaacttggaggacctaagagtagctgtcactttaaacagctgcggtcgttaaataaaattattttgtcatcacttattggaataaatacttgctcaga

SEQ ID NO: 5 - DNA, 6078 bp, Macaca fascicularis
ctgggaactgcggccgcgggctcgcgctcccggcagggccctgttcccgggctgccatccttgccctgccatgtctcgccggaagcctgcgttgggcggcctcgctgcctccagcccagtccctgcgaggcaagctgttttgagccgattcttccagtctacgggaagcctgaaatccacctcctcccccacgggtgcaaccgatcaggtggaccgtgacgccgcagcgcccccagcgtccactttcccgccccagctgccgccgctcgtggctccagaaattgacagaagtaagaagagaccattggaaaatgatgggcctgttaaaaagaaagtaaagaaagcccaacaaaaggaaggaggaagtgatctgggaatgtctggcaactctgagccaaagaaatgtctgaggaccaggaatgttttaaagtctctggaaaaattgaaagaattctgctgtgattctgcccttcctcaaagtagagtccagacagaatctctgcaggagagatttgcagttctgccaaaatgtactgattttgatgatatcagtcttctacgtgcaaagaatgcagtttcttctgaagattcgaaatgtcaaattaaacaaaaggatacaacactttttgatgtcagtcagtttggatcatcaaatacaagtcatgaaaatttacagaaaactgcttctaaaccagctaacaaacgttccaaaagcatttatacgccgctagaattacaatacatagaaatgaagcagcagcacaaagatgcagttttgtgtgtggaatgtggatataagtatagattctttggggaagatgcagagattgcagcccgagagctcaatatttattgccatttagatcacaactttatgacagcaagtatacctactcacagactgtttgttcatgtacgccgcctggtggcaaaaggatataaggtgggagttgtgaagcaaactgaaactgcagcattaaaggccattggagacaacagaagttcactcttttcccggaaattgactgccctttatacaaaatctacactcattggagaagatgtgaatcccctaatcaagctggatgatgctgtaaatgttgatgagataatgactgatacttctaccagctatcttctgtgcatctctgaaaataaggaaaatgttagggacaaaaaaaagggcatcgtttttattggcattgtgggagtgcagcctgccacaggcgaggttgtgtttgatagtttccaggactctgcttctcgttcagagctagaaacccggatgtcaaacctgcagccagtagagctgctgcttccttcggccttgtccgagcaaacagagatgctcatccacagagccacatctgttagtgtgcaggatgacagaattcgagttgaaaggatggataacatttattttgaatacagccatgctttccaggcagttacagagttttatgcaaaagacacagttgacatcaaaggttctcaaattatttctggcattgttaacttagagaagcctgtgatttgctctttggctgccatcataaaatacctcaaagaattcaacttggaaaaaatgctctccaaacctgagaattttaaacagctatcaagtaaaatggaatttatgacaattaatggaacaacattaaggaatctggaaatcctacagaatcagactgatatgaaaaccaaaggaagtttgctgtgggttttagaccacactaaaacttcatttgggagacggaagttaaagaagtgggtgacccagccactccttaaattaagggaaataaatgcccggcttgatgctgtatctgaagttctccattcagaatctagtgtgtttggtcagatagaaaatcatctacgtaaattgcctgacatagagagaggactctgtagcatttatcacaaaaaatgttctacccaagagttcttcttgattgtcaaaaccttatatcacctaaagtcagaatttcaagcaataatacctgctgttaattcccacgttcagtcagacttgctccgcaccgttattttagaaattcctgaactcctcagtccagtggagcattacttaaagatactcaatgaacaagctgccaaagttggggataaaactgaattatttaaagacctttctgacttccctttaataaaaaagaggaaggatgaaattcaaggtgttagtgacaagatccgaatgcatttgcaagaaatacgaaaaatactaaaaaatccttctgcacaatatgtgacagtatcaggacaggagtttatgatcgaaataaagaactctgctgtatcttgtataccaactgattgggtaaaggttggaagcacaaaagctgtgagccggtttcactctccttttgttgtagaaaattacagacatctgaatcaactccgggagcagctagtccttgactgcagtgctgaatggcttgattttctagagaaattcagtgaacattatcactacttgtgtaaagcagtgcatcacctagcaactgttgactgcattttctccctggccaaggtcgctaagcaaggaaattactgcagaccaactgtacaagaagaaagaaaaatcataataaaaaatggaaggcatcctgtgattgatgtgttgctgggagaacaggatcaatatgttcccaatagtacagatttatcagaggactcagagagagtaatgataattactggaccaaacatgggtggaaagagctcctacataaaacaagttgcattgattaccatcatggctcagattggctcctatgttcctgcagaagaagcgacaattgggattgtggatggcattttcacaaggatgggtgctgcagacaatatatataaaggacggagtacatttatggaagaactgactgacacagcagaaataatcagaaaagcaacatcacagtccttggttatcttggatgaattgggaagagggacgagcacccatgatggaattgccattgcctatgctacacttgagtatttcatcagagatgtgaaatccttaaccctgtttgtcacccattatccgccagtttgtgagctagaaaaaaattactcacaccaggtggggaattaccacatgggattcttggtcagcgaggatgaaagcaaactggatccaggcgaagaacaagtccctgattttgtcaccttcctttaccaaataactagaggaattgcagcaaggagttatggattaaatgtggctaaactagcagatattcctggagaaattttgaagaaagcagctcacaagtcaaaagagctggaaggattaataaatacgaaaaggaagagactcaagtattttgcaaagttatggacgatgcataatgcacaagacctgcagaagtggacagaggagttcgaaatggaagaaacacagacttctcttcctcattaaaataaagacttacatttgtgaacaaaaaatggagaattaaaaataccaactgtacaaaataactctccagtaacagcctatgtttgtgtgacatgtgagcataaaattatgaccatggtatattcctactggaaacagagaggtttttctgaagacagtctttttcaggttcctgtcttcctaacttttctaagtataaacactcttgaatagacttccactttgtaattagaaaatttcatggacagtaagtccagtaaagccttaagtggcagaatataattcccaagcttttggagggtgatataaaaatttacttcatatttttatttgtttcagttcagataattggcagctgggtgaatctggcaggaatctctccatttgaactaaaataattttattaggcagccagtttatccaccaagaacataagaattttttataagaaatagaaagaattggccaggcatggtagctcacgcctgtaatcccagcactttgggaggccaaggcgggcagatcacctgaggtcatgagttcaagaccagcctggccaacatggcaaaaccccatctctactaaaaatataaagtacatctctactaaaaatacaaaaacattagtcgggcatggtggcgcacgcctgtagccccagctactcgggaggctgaggcaggagaatctcttgaacctgggaggtggagattgcagtaagctgagatcacgtgactgcattccagcctgggcaatatagtgagattccatctcaaaaaaaaaaaaaagaaagaggaaagaaatagaattatcaagcttttaaaaactagggcatagaaagaataaggtcatgaaatttaaaatattaaatattgtcacaggattaagcagtttaaagacttggatgaaattatttgtcatttgtttgagtaataaatatttaatgaatacttgctatagatgatggtatgtcccattgaattttggtgttttcaagtgtttggaaattgtcatttttttaggtgtaattatgaaattaaggttactgctttgatcagcgcaatacacagaagtgaacttattcatttgggaccttgctattcatcaacataccaagtgtatgatcttcccagtaatgagccttacagcttagttgattcataacagtgctcccttcctgcaaatttagggtaacacgtgctcaactgtgtccctgggttttttacagcacttacaatctggcttcccagatccatgtgttctttttgtttctaaatatatgatcttgcacaaaagctctccatcctattttcctctcttttattatttctgctcagttaaatgtcttccccacatttgatggacatatttttcattccttcttctgcattattaccttcagtgatcccagcaatgaccccagacacaggagtcaatacagtgtccccaggttgtggcttcacttttgagtcagtcactcttcagctatcagactcccaaccttattggagttagagtatgatgtagtttgattctaccacccgtccagagatactaatgtatagtcaaattctcaaaactgtcaaaatagagttagttggaatgtatgctttaacttttaaaaagaacaaaattgtttcaatactctatataactgtaaatgtcttatattctttctaacaagatttcaaagatagtgctgtaacctcacctcacagggagaaaaggagatgactccaggaatgtgatgcccatgccagagggagctgcagggaccagcaatcactggtaatgtccaggtggacatctggagccacctctccctcttgcttggtccaggccagcatcaacactgaagcaggtaggggttccaggagcattgtgtcctggcagtggcagcacacagtgtctggcagctgacagtgtagaactttacagggtagattctccagcatgagcaggacgccagccaggccgccagcttgcggaagcgcaggcctcctctaagctggggaagagatcagcaccgctgaacagcatttctaagtgaggctcatccccagctgggttactgagatattggaggaaatgttgaggccaaatcccagtcataaagactgcataaatgccatggggaggtaggcagaaagttgcaaacaattgtgtttgtatttcagataaccatcttggggctgcaattctaaggttagatataaccacacaggtgagaatagggctgctggtgcatggcaagggcccttcagattccctctggtactgcataggcatgagcatacttcagatggagactgggggagacagggctgactggtggccaaatgtcaaggaaagcaacttttgaatatgatgtattcctttaaatgacttgtctgtttttagccatcaaattacaaattaagagctagtgattctgcaataacacacaccaattcctcgaaaaccttctaaagtcagaccagtttaataattccaaccttaggggaaaaaaagccaaacacattttaacaagtttcaactttgacctttctattgcttcatctctcctcagtgctgtctattctatgtagtttttaaaatattcttattatataactagtataacaatatttgaaaat

SEQ ID NO: 6 - RNA, 19 nt, Artificial Sequence
  Synthetic oligonucleotide
ccgccgcacauagcuacaa

SEQ ID NO: 7 - RNA, 19 nt, Artificial Sequence
  Synthetic oligonucleotide
uuguagcuaugugcggcgg

SEQ ID NO: 8 - RNA, 19 nt, Artificial Sequence
  Synthetic oligonucleotide
cgccgcacauagcuacaga

SEQ ID NO: 9 - RNA, 19 nt, Artificial Sequence
  Synthetic oligonucleotide
ucuguagcuaugugcggcg

SEQ ID NO: 10 - RNA, 19 nt, Artificial Sequence
  Synthetic oligonucleotide
gccgcacauagcuacagaa

SEQ ID NO: 11 - RNA, 19 nt, Artificial Sequence
  Synthetic oligonucleotide
uucuguagcuaugugcggc

SEQ ID NO: 12 - RNA, 19 nt, Artificial Sequence
  Synthetic oligonucleotide
cgcacauagcuacagaaaa

SEQ ID NO: 13 - RNA, 19 nt, Artificial Sequence
  Synthetic oligonucleotide
uuuucuguagcuaugugcg

SEQ ID NO: 14 - RNA, 19 nt, Artificial Sequence
  Synthetic oligonucleotide
gcacauagcuacagaaaua

SEQ ID NO: 15 - RNA, 19 nt, Artificial Sequence
  Synthetic oligonucleotide
uauuucuguagcuaugugc

SEQ ID NO: 16 - RNA, 19 nt, Artificial Sequence
  Synthetic oligonucleotide
cacauagcuacagaaauua

SEQ ID NO: 17 - RNA, 19 nt, Artificial Sequence
  Synthetic oligonucleotide
uaauuucuguagcuaugug

SEQ ID NO: 18 - RNA, 19 nt, Artificial Sequence
  Synthetic oligonucleotide
auagcuacagaaauugaca

SEQ ID NO: 19 - RNA, 19 nt, Artificial Sequence
  Synthetic oligonucleotide
ugucaauuucuguagcuau

SEQ ID NO: 20 - RNA, 19 nt, Artificial Sequence
  Synthetic oligonucleotide
gcuacagaaauugacagaa

SEQ ID NO: 21 - RNA, 19 nt, Artificial Sequence
  Synthetic oligonucleotide
uucugucaauuucuguagc

SEQ ID NO: 22 - RNA, 19 nt, Artificial Sequence
  Synthetic oligonucleotide
uugacagaagaaagaagaa

SEQ ID NO: 23 - RNA, 19 nt, Artificial Sequence
  Synthetic oligonucleotide
uucuucuuucuucugucaa

SEQ ID NO: 24 - RNA, 19 nt, Artificial Sequence
  Synthetic oligonucleotide
cagaagaaagaagagacca

SEQ ID NO: 25 - RNA, 19 nt, Artificial Sequence
  Synthetic oligonucleotide
uggucucuucuuucuucug

SEQ ID NO: 26 - RNA, 19 nt, Artificial Sequence
  Synthetic oligonucleotide
agaagaaagaagagaccaa

SEQ ID NO: 27 - RNA, 19 nt, Artificial Sequence
  Synthetic oligonucleotide
uuggucucuucuuucuucu

SEQ ID NO: 28 - RNA, 19 nt, Artificial Sequence
  Synthetic oligonucleotide
agaaagaagagaccauuga

SEQ ID NO: 29 - RNA, 19 nt, Artificial Sequence
  Synthetic oligonucleotide
ucaauggucucuucuuucu

SEQ ID NO: 30 - RNA, 19 nt, Artificial Sequence
  Synthetic oligonucleotide
gagaccauuggaaaaugaa

SEQ ID NO: 31 - RNA, 19 nt, Artificial Sequence
  Synthetic oligonucleotide
uucauuuuccaauggucuc

SEQ ID NO: 32 - RNA, 19 nt, Artificial Sequence
  Synthetic oligonucleotide
ccauuggaaaaugauggga

SEQ ID NO: 33 - RNA, 19 nt, Artificial Sequence
  Synthetic oligonucleotide
ucccaucauuuuccaaugg

SEQ ID NO: 34 - RNA, 19 nt, Artificial Sequence
  Synthetic oligonucleotide
aaaaugaugggccuguuaa

SEQ ID NO: 35 - RNA, 19 nt, Artificial Sequence
  Synthetic oligonucleotide
uuaacaggcccaucauuuu

SEQ ID NO: 36 - RNA, 19 nt, Artificial Sequence
  Synthetic oligonucleotide
agaaaguaaagaaagucca

SEQ ID NO: 37 - RNA, 19 nt, Artificial Sequence
  Synthetic oligonucleotide
uggacuuucuuuacuuucu

SEQ ID NO: 38 - RNA, 19 nt, Artificial Sequence
  Synthetic oligonucleotide
gaaaguaaagaaaguccaa

SEQ ID NO: 39 - RNA, 19 nt, Artificial Sequence
  Synthetic oligonucleotide
uuggacuuucuuuacuuuc

SEQ ID NO: 40 - RNA, 19 nt, Artificial Sequence
  Synthetic oligonucleotide
aaguaaagaaaguccaaca

SEQ ID NO: 41 - RNA, 19 nt, Artificial Sequence
  Synthetic oligonucleotide
uguuggacuuucuuuacuu

SEQ ID NO: 42 - RNA, 19 nt, Artificial Sequence
  Synthetic oligonucleotide
aguaaagaaaguccaacaa

SEQ ID NO: 43 - RNA, 19 nt, Artificial Sequence
  Synthetic oligonucleotide
uuguuggacuuucuuuacu

SEQ ID NO: 44 - RNA, 19 nt, Artificial Sequence
  Synthetic oligonucleotide
guaaagaaaguccaacaaa

SEQ ID NO: 45 - RNA, 19 nt, Artificial Sequence
  Synthetic oligonucleotide
uuuguuggacuuucuuuac

SEQ ID NO: 46 - RNA, 19 nt, Artificial Sequence
  Synthetic oligonucleotide
uaaagaaaguccaacaaaa

SEQ ID NO: 47 - RNA, 19 nt, Artificial Sequence
  Synthetic oligonucleotide
uuuuguuggacuuucuuua

SEQ ID NO: 48 - RNA, 19 nt, Artificial Sequence
  Synthetic oligonucleotide
agaaaguccaacaaaagga

SEQ ID NO: 49 - RNA, 19 nt, Artificial Sequence
  Synthetic oligonucleotide
uccuuuuguuggacuuucu

SEQ ID NO: 50 - RNA, 19 nt, Artificial Sequence
  Synthetic oligonucleotide
gaaaguccaacaaaaggaa

SEQ ID NO: 51 - RNA, 19 nt, Artificial Sequence
  Synthetic oligonucleotide
uuccuuuuguuggacuuuc

SEQ ID NO: 52 - RNA, 19 nt, Artificial Sequence
  Synthetic oligonucleotide
aaaguccaacaaaaggaaa

SEQ ID NO: 53 - RNA, 19 nt, Artificial Sequence
  Synthetic oligonucleotide
uuuccuuuuguuggacuuu

SEQ ID NO: 54 - RNA, 19 nt, Artificial Sequence
  Synthetic oligonucleotide
aguccaacaaaaggaagga

SEQ ID NO: 55 - RNA, 19 nt, Artificial Sequence
  Synthetic oligonucleotide
uccuuccuuuuguuggacu

SEQ ID NO: 56 - RNA, 19 nt, Artificial Sequence
  Synthetic oligonucleotide
aaggaaggaggaagugaua

SEQ ID NO: 57 - RNA, 19 nt, Artificial Sequence
  Synthetic oligonucleotide
uaucacuuccuccuuccuu

SEQ ID NO: 58 - RNA, 19 nt, Artificial Sequence
  Synthetic oligonucleotide
aggaagugaucugggaaua

SEQ ID NO: 59 - RNA, 19 nt, Artificial Sequence
  Synthetic oligonucleotide
uauucccagaucacuuccu

SEQ ID NO: 60 - RNA, 19 nt, Artificial Sequence
  Synthetic oligonucleotide
agugaucugggaaugucua

SEQ ID NO: 61 - RNA, 19 nt, Artificial Sequence
  Synthetic oligonucleotide
uagacauucccagaucacu

SEQ ID NO: 62 - RNA, 19 nt, Artificial Sequence
  Synthetic oligonucleotide
ucugggaaugucuggcaaa

SEQ ID NO: 63 - RNA, 19 nt, Artificial Sequence
  Synthetic oligonucleotide
uuugccagacauucccaga

SEQ ID NO: 64 - RNA, 19 nt, Artificial Sequence
  Synthetic oligonucleotide
ugggaaugucuggcaacua

SEQ ID NO: 65 - RNA, 19 nt, Artificial Sequence
  Synthetic oligonucleotide
uaguugccagacauuccca

SEQ ID NO: 66 - RNA, 19 nt, Artificial Sequence
  Synthetic oligonucleotide
gaaugucuggcaacucuga

SEQ ID NO: 67 - RNA, 19 nt, Artificial Sequence
  Synthetic oligonucleotide
ucagaguugccagacauuc

SEQ ID NO: 68 - RNA, 19 nt, Artificial Sequence
  Synthetic oligonucleotide
aaugucuggcaacucugaa

SEQ ID NO: 69 - RNA, 19 nt, Artificial Sequence
  Synthetic oligonucleotide
uucagaguugccagacauu

SEQ ID NO: 70 - RNA, 19 nt, Artificial Sequence
  Synthetic oligonucleotide
augucuggcaacucugaga

SEQ ID NO: 71 - RNA, 19 nt, Artificial Sequence
  Synthetic oligonucleotide
ucucagaguugccagacau

SEQ ID NO: 72 - RNA, 19 nt, Artificial Sequence
  Synthetic oligonucleotide
uggcaacucugagccaaaa

SEQ ID NO: 73 - RNA, 19 nt, Artificial Sequence
  Synthetic oligonucleotide
uuuuggcucagaguugcca

SEQ ID NO: 74 - RNA, 19 nt, Artificial Sequence
  Synthetic oligonucleotide
ggcaacucugagccaaaga

SEQ ID NO: 75 - RNA, 19 nt, Artificial Sequence
  Synthetic oligonucleotide
ucuuuggcucagaguugcc

SEQ ID NO: 76 - RNA, 19 nt, Artificial Sequence
  Synthetic oligonucleotide
caacucugagccaaagaaa

SEQ ID NO: 77 - RNA, 19 nt, Artificial Sequence
  Synthetic oligonucleotide
uuucuuuggcucagaguug

SEQ ID NO: 78 - RNA, 19 nt, Artificial Sequence
  Synthetic oligonucleotide
acucugagccaaagaaaua

SEQ ID NO: 79 - RNA, 19 nt, Artificial Sequence
  Synthetic oligonucleotide
uauuucuuuggcucagagu

SEQ ID NO: 80 - RNA, 19 nt, Artificial Sequence
  Synthetic oligonucleotide
ucugagccaaagaaaugua

SEQ ID NO: 81 - RNA, 19 nt, Artificial Sequence
  Synthetic oligonucleotide
uacauuucuuuggcucaga

SEQ ID NO: 82 - RNA, 19 nt, Artificial Sequence
  Synthetic oligonucleotide
ugagccaaagaaaugucua

SEQ ID NO: 83 - RNA, 19 nt, Artificial Sequence
  Synthetic oligonucleotide
uagacauuucuuuggcuca

SEQ ID NO: 84 - RNA, 19 nt, Artificial Sequence
  Synthetic oligonucleotide
gucugaggaccaggaauga

SEQ ID NO: 85 - RNA, 19 nt, Artificial Sequence
  Synthetic oligonucleotide
ucauuccugguccucagac

SEQ ID NO: 86 - RNA, 19 nt, Artificial Sequence
  Synthetic oligonucleotide
ucugaggaccaggaaugua

SEQ ID NO: 87 - RNA, 19 nt, Artificial Sequence
  Synthetic oligonucleotide
uacauuccugguccucaga

SEQ ID NO: 88 - RNA, 19 nt, Artificial Sequence
  Synthetic oligonucleotide
gaggaccaggaauguuuca

SEQ ID NO: 89 - RNA, 19 nt, Artificial Sequence
  Synthetic oligonucleotide
ugaaacauuccugguccuc

SEQ ID NO: 90 - RNA, 19 nt, Artificial Sequence
  Synthetic oligonucleotide
aggaccaggaauguuucaa

SEQ ID NO: 91 - RNA, 19 nt, Artificial Sequence
  Synthetic oligonucleotide
uugaaacauuccugguccu

SEQ ID NO: 92 - RNA, 19 nt, Artificial Sequence
  Synthetic oligonucleotide
ggaccaggaauguuucaaa

SEQ ID NO: 93 - RNA, 19 nt, Artificial Sequence
  Synthetic oligonucleotide
uuugaaacauuccuggucc

SEQ ID NO: 94 - RNA, 19 nt, Artificial Sequence
  Synthetic oligonucleotide
accaggaauguuucaaaga

SEQ ID NO: 95 - RNA, 19 nt, Artificial Sequence
  Synthetic oligonucleotide
ucuuugaaacauuccuggu

SEQ ID NO: 96 - RNA, 19 nt, Artificial Sequence
  Synthetic oligonucleotide
ggaauguuucaaagucuca

SEQ ID NO: 97 - RNA, 19 nt, Artificial Sequence
  Synthetic oligonucleotide
ugagacuuugaaacauucc

SEQ ID NO: 98 - RNA, 19 nt, Artificial Sequence
  Synthetic oligonucleotide
uguuucaaagucucuggaa

SEQ ID NO: 99 - RNA, 19 nt, Artificial Sequence
  Synthetic oligonucleotide
uuccagagacuuugaaaca

SEQ ID NO: 100 - RNA, 19 nt, Artificial Sequence
  Synthetic oligonucleotide
aauucugcugcgauucuga

SEQ ID NO: 101 - RNA, 19 nt, Artificial Sequence
  Synthetic oligonucleotide
ucagaaucgcagcagaauu

SEQ ID NO: 102 - RNA, 19 nt, Artificial Sequence
  Synthetic oligonucleotide
gauucugcccuuccucaaa

SEQ ID NO: 103 - RNA, 19 nt, Artificial Sequence
  Synthetic oligonucleotide
uuugaggaagggcagaauc

SEQ ID NO: 104 - RNA, 19 nt, Artificial Sequence
  Synthetic oligonucleotide
cugcccuuccucaaaguaa

SEQ ID NO: 105 - RNA, 19 nt, Artificial Sequence
  Synthetic oligonucleotide
uuacuuugaggaagggcag

SEQ ID NO: 106 - RNA, 19 nt, Artificial Sequence
  Synthetic oligonucleotide
ugcccuuccucaaaguaga

SEQ ID NO: 107 - RNA, 19 nt, Artificial Sequence
  Synthetic oligonucleotide
ucuacuuugaggaagggca

SEQ ID NO: 108 - RNA, 19 nt, Artificial Sequence
  Synthetic oligonucleotide
cccuuccucaaaguagaga

SEQ ID NO: 109 - RNA, 19 nt, Artificial Sequence
  Synthetic oligonucleotide
ucucuacuuugaggaaggg

SEQ ID NO: 110 - RNA, 19 nt, Artificial Sequence
  Synthetic oligonucleotide
ccuuccucaaaguagagua

SEQ ID NO: 111 - RNA, 19 nt, Artificial Sequence
  Synthetic oligonucleotide
uacucuacuuugaggaagg

SEQ ID NO: 112 - RNA, 19 nt, Artificial Sequence
  Synthetic oligonucleotide
cuuccucaaaguagaguca

SEQ ID NO: 113 - RNA, 19 nt, Artificial Sequence
  Synthetic oligonucleotide
ugacucuacuuugaggaag

SEQ ID NO: 114 - RNA, 19 nt, Artificial Sequence
  Synthetic oligonucleotide
uuccucaaaguagagucca

SEQ ID NO: 115 - RNA, 19 nt, Artificial Sequence
  Synthetic oligonucleotide
uggacucuacuuugaggaa

SEQ ID NO: 116 - RNA, 19 nt, Artificial Sequence
  Synthetic oligonucleotide
cucaaaguagaguccagaa

SEQ ID NO: 117 - RNA, 19 nt, Artificial Sequence
  Synthetic oligonucleotide
uucuggacucuacuuugag

SEQ ID NO: 118 - RNA, 19 nt, Artificial Sequence
  Synthetic oligonucleotide
aaguagaguccagacagaa

SEQ ID NO: 119 - RNA, 19 nt, Artificial Sequence
  Synthetic oligonucleotide
uucugucuggacucuacuu

SEQ ID NO: 120 - RNA, 19 nt, Artificial Sequence
  Synthetic oligonucleotide
aguagaguccagacagaaa

SEQ ID NO: 121 - RNA, 19 nt, Artificial Sequence
  Synthetic oligonucleotide
uuucugucuggacucuacu

SEQ ID NO: 122 - RNA, 19 nt, Artificial Sequence
  Synthetic oligonucleotide
agaguccagacagaaucua

SEQ ID NO: 123 - RNA, 19 nt, Artificial Sequence
  Synthetic oligonucleotide
uagauucugucuggacucu

SEQ ID NO: 124 - RNA, 19 nt, Artificial Sequence
  Synthetic oligonucleotide
gaguccagacagaaucuca

SEQ ID NO: 125 - RNA, 19 nt, Artificial Sequence
  Synthetic oligonucleotide
ugagauucugucuggacuc

SEQ ID NO: 126 - RNA, 19 nt, Artificial Sequence
  Synthetic oligonucleotide
guccagacagaaucucuga

SEQ ID NO: 127 - RNA, 19 nt, Artificial Sequence
  Synthetic oligonucleotide
ucagagauucugucuggac

SEQ ID NO: 128 - RNA, 19 nt, Artificial Sequence
  Synthetic oligonucleotide
uccagacagaaucucugca

SEQ ID NO: 129 - RNA, 19 nt, Artificial Sequence
  Synthetic oligonucleotide
ugcagagauucugucugga

SEQ ID NO: 130 - RNA, 19 nt, Artificial Sequence
  Synthetic oligonucleotide
ucucugcaggagagauuua

SEQ ID NO: 131 - RNA, 19 nt, Artificial Sequence
  Synthetic oligonucleotide
uaaaucucuccugcagaga

SEQ ID NO: 132 - RNA, 19 nt, Artificial Sequence
  Synthetic oligonucleotide
gcaggagagauuugcagua

SEQ ID NO: 133 - RNA, 19 nt, Artificial Sequence
  Synthetic oligonucleotide
uacugcaaaucucuccugc

SEQ ID NO: 134 - RNA, 19 nt, Artificial Sequence
  Synthetic oligonucleotide
caggagagauuugcaguua

SEQ ID NO: 135 - RNA, 19 nt, Artificial Sequence
  Synthetic oligonucleotide
uaacugcaaaucucuccug

SEQ ID NO: 136 - RNA, 19 nt, Artificial Sequence
  Synthetic oligonucleotide
gagagauuugcaguucuga

SEQ ID NO: 137 - RNA, 19 nt, Artificial Sequence
  Synthetic oligonucleotide
ucagaacugcaaaucucuc

SEQ ID NO: 138 - RNA, 19 nt, Artificial Sequence
  Synthetic oligonucleotide
agagauuugcaguucugca

SEQ ID NO: 139 - RNA, 19 nt, Artificial Sequence
  Synthetic oligonucleotide
ugcagaacugcaaaucucu

SEQ ID NO: 140 - RNA, 19 nt, Artificial Sequence
  Synthetic oligonucleotide
agauuugcaguucugccaa

SEQ ID NO: 141 - RNA, 19 nt, Artificial Sequence
  Synthetic oligonucleotide
uuggcagaacugcaaaucu

SEQ ID NO: 142 - RNA, 19 nt, Artificial Sequence
  Synthetic oligonucleotide
gauuugcaguucugccaaa

SEQ ID NO: 143 - RNA, 19 nt, Artificial Sequence
  Synthetic oligonucleotide
uuuggcagaacugcaaauc

SEQ ID NO: 144 - RNA, 19 nt, Artificial Sequence
  Synthetic oligonucleotide
auuugcaguucugccaaaa

SEQ ID NO: 145 - RNA, 19 nt, Artificial Sequence
  Synthetic oligonucleotide
uuuuggcagaacugcaaau

SEQ ID NO: 146 - RNA, 19 nt, Artificial Sequence
  Synthetic oligonucleotide
uugcaguucugccaaaaua

SEQ ID NO: 147 - RNA, 19 nt, Artificial Sequence
  Synthetic oligonucleotide
uauuuuggcagaacugcaa

SEQ ID NO: 148 - RNA, 19 nt, Artificial Sequence
  Synthetic oligonucleotide
aguucugccaaaauguaca

SEQ ID NO: 149 - RNA, 19 nt, Artificial Sequence
  Synthetic oligonucleotide
uguacauuuuggcagaacu

SEQ ID NO: 150 - RNA, 19 nt, Artificial Sequence
  Synthetic oligonucleotide
guucugccaaaauguacua

SEQ ID NO: 151 - RNA, 19 nt, Artificial Sequence
  Synthetic oligonucleotide
uaguacauuuuggcagaac

SEQ ID NO: 152 - RNA, 19 nt, Artificial Sequence
  Synthetic oligonucleotide
uucugccaaaauguacuga

SEQ ID NO: 153 - RNA, 19 nt, Artificial Sequence
  Synthetic oligonucleotide
ucaguacauuuuggcagaa

SEQ ID NO: 154 - RNA, 19 nt, Artificial Sequence
  Synthetic oligonucleotide
cugccaaaauguacugaua

SEQ ID NO: 155 - RNA, 19 nt, Artificial Sequence
  Synthetic oligonucleotide
uaucaguacauuuuggcag

SEQ ID NO: 156 - RNA, 19 nt, Artificial Sequence
  Synthetic oligonucleotide
gccaaaauguacugauuua

SEQ ID NO: 157 - RNA, 19 nt, Artificial Sequence
  Synthetic oligonucleotide
uaaaucaguacauuuuggc

SEQ ID NO: 158 - RNA, 19 nt, Artificial Sequence
  Synthetic oligonucleotide
guacugauuuugaugauaa

SEQ ID NO: 159 - RNA, 19 nt, Artificial Sequence
  Synthetic oligonucleotide
uuaucaucaaaaucaguac

SEQ ID NO: 160 - RNA, 19 nt, Artificial Sequence
  Synthetic oligonucleotide
acugauuuugaugauauca

SEQ ID NO: 161 - RNA, 19 nt, Artificial Sequence
  Synthetic oligonucleotide
ugauaucaucaaaaucagu

SEQ ID NO: 162 - RNA, 19 nt, Artificial Sequence
  Synthetic oligonucleotide
ugaugauaucagucuucua

SEQ ID NO: 163 - RNA, 19 nt, Artificial Sequence
  Synthetic oligonucleotide
uagaagacugauaucauca

SEQ ID NO: 164 - RNA, 19 nt, Artificial Sequence
  Synthetic oligonucleotide
augauaucagucuucuaca

SEQ ID NO: 165 - RNA, 19 nt, Artificial Sequence
  Synthetic oligonucleotide
uguagaagacugauaucau

SEQ ID NO: 166 - RNA, 19 nt, Artificial Sequence
  Synthetic oligonucleotide
ugauaucagucuucuacaa

SEQ ID NO: 167 - RNA, 19 nt, Artificial Sequence
  Synthetic oligonucleotide
uuguagaagacugauauca

SEQ ID NO: 168 - RNA, 19 nt, Artificial Sequence
  Synthetic oligonucleotide
auaucagucuucuacacga

SEQ ID NO: 169 - RNA, 19 nt, Artificial Sequence
  Synthetic oligonucleotide
ucguguagaagacugauau

SEQ ID NO: 170 - RNA, 19 nt, Artificial Sequence
  Synthetic oligonucleotide
ucagucuucuacacgcaaa

SEQ ID NO: 171 - RNA, 19 nt, Artificial Sequence
  Synthetic oligonucleotide
uuugcguguagaagacuga

SEQ ID NO: 172 - RNA, 19 nt, Artificial Sequence
  Synthetic oligonucleotide
cagucuucuacacgcaaaa

SEQ ID NO: 173 - RNA, 19 nt, Artificial Sequence
  Synthetic oligonucleotide
uuuugcguguagaagacug

SEQ ID NO: 174 - RNA, 19 nt, Artificial Sequence
  Synthetic oligonucleotide
agucuucuacacgcaaaga

SEQ ID NO: 175 - RNA, 19 nt, Artificial Sequence
  Synthetic oligonucleotide
ucuuugcguguagaagacu

SEQ ID NO: 176 - RNA, 19 nt, Artificial Sequence
  Synthetic oligonucleotide
ucuucuacacgcaaagaaa

SEQ ID NO: 177 - RNA, 19 nt, Artificial Sequence
  Synthetic oligonucleotide
uuucuuugcguguagaaga

SEQ ID NO: 178 - RNA, 19 nt, Artificial Sequence
  Synthetic oligonucleotide
cuucuacacgcaaagaaua

SEQ ID NO: 179 - RNA, 19 nt, Artificial Sequence
  Synthetic oligonucleotide
uauucuuugcguguagaag

SEQ ID NO: 180 - RNA, 19 nt, Artificial Sequence
  Synthetic oligonucleotide
uucuacacgcaaagaauga

SEQ ID NO: 181 - RNA, 19 nt, Artificial Sequence
  Synthetic oligonucleotide
ucauucuuugcguguagaa

SEQ ID NO: 182 - RNA, 19 nt, Artificial Sequence
  Synthetic oligonucleotide
ucuacacgcaaagaaugca

SEQ ID NO: 183 - RNA, 19 nt, Artificial Sequence
  Synthetic oligonucleotide
ugcauucuuugcguguaga

SEQ ID NO: 184 - RNA, 19 nt, Artificial Sequence
  Synthetic oligonucleotide
cuacacgcaaagaaugcaa

SEQ ID NO: 185 - RNA, 19 nt, Artificial Sequence
  Synthetic oligonucleotide
uugcauucuuugcguguag

SEQ ID NO: 186 - RNA, 19 nt, Artificial Sequence
  Synthetic oligonucleotide
acacgcaaagaaugcagua

SEQ ID NO: 187 - RNA, 19 nt, Artificial Sequence
  Synthetic oligonucleotide
uacugcauucuuugcgugu

SEQ ID NO: 188 - RNA, 19 nt, Artificial Sequence
  Synthetic oligonucleotide
cacgcaaagaaugcaguua

SEQ ID NO: 189 - RNA, 19 nt, Artificial Sequence
  Synthetic oligonucleotide
uaacugcauucuuugcgug

SEQ ID NO: 190 - RNA, 19 nt, Artificial Sequence
  Synthetic oligonucleotide
aagaaugcaguuucuucua

SEQ ID NO: 191 - RNA, 19 nt, Artificial Sequence
  Synthetic oligonucleotide
uagaagaaacugcauucuu

SEQ ID NO: 192 - RNA, 19 nt, Artificial Sequence
  Synthetic oligonucleotide
aguuucuucugaagauuca

SEQ ID NO: 193 - RNA, 19 nt, Artificial Sequence
  Synthetic oligonucleotide
ugaaucuucagaagaaacu

SEQ ID NO: 194 - RNA, 19 nt, Artificial Sequence
  Synthetic oligonucleotide
ucugaagauucgaaacgua

SEQ ID NO: 195 - RNA, 19 nt, Artificial Sequence
  Synthetic oligonucleotide
uacguuucgaaucuucaga

SEQ ID NO: 196 - RNA, 19 nt, Artificial Sequence
  Synthetic oligonucleotide
ugaagauucgaaacgucaa

SEQ ID NO: 197 - RNA, 19 nt, Artificial Sequence
  Synthetic oligonucleotide
uugacguuucgaaucuuca

SEQ ID NO: 198 - RNA, 19 nt, Artificial Sequence
  Synthetic oligonucleotide
gaagauucgaaacgucaaa

SEQ ID NO: 199 - RNA, 19 nt, Artificial Sequence
  Synthetic oligonucleotide
uuugacguuucgaaucuuc

SEQ ID NO: 200 - RNA, 19 nt, Artificial Sequence
  Synthetic oligonucleotide
aagauucgaaacgucaaaa

SEQ ID NO: 201 - RNA, 19 nt, Artificial Sequence
  Synthetic oligonucleotide
uuuugacguuucgaaucuu

SEQ ID NO: 202 - RNA, 19 nt, Artificial Sequence
  Synthetic oligonucleotide
agauucgaaacgucaaaua

SEQ ID NO: 203 - RNA, 19 nt, Artificial Sequence
  Synthetic oligonucleotide
uauuugacguuucgaaucu

SEQ ID NO: 204 - RNA, 19 nt, Artificial Sequence
  Synthetic oligonucleotide
gauucgaaacgucaaauua

SEQ ID NO: 205 - RNA, 19 nt, Artificial Sequence
  Synthetic oligonucleotide
uaauuugacguuucgaauc

SEQ ID NO: 206 - RNA, 19 nt, Artificial Sequence
  Synthetic oligonucleotide
uucgaaacgucaaauuaaa

SEQ ID NO: 207 - RNA, 19 nt, Artificial Sequence
  Synthetic oligonucleotide
uuuaauuugacguuucgaa

SEQ ID NO: 208 - RNA, 19 nt, Artificial Sequence
  Synthetic oligonucleotide
gaaacgucaaauuaaucaa

SEQ ID NO: 209 - RNA, 19 nt, Artificial Sequence
  Synthetic oligonucleotide
uugauuaauuugacguuuc

SEQ ID NO: 210 - RNA, 19 nt, Artificial Sequence
  Synthetic oligonucleotide
aaacgucaaauuaaucaaa

SEQ ID NO: 211 - RNA, 19 nt, Artificial Sequence
  Synthetic oligonucleotide
uuugauuaauuugacguuu

SEQ ID NO: 212 - RNA, 19 nt, Artificial Sequence
  Synthetic oligonucleotide
aacgucaaauuaaucaaaa

SEQ ID NO: 213 - RNA, 19 nt, Artificial Sequence
  Synthetic oligonucleotide
uuuugauuaauuugacguu

SEQ ID NO: 214 - RNA, 19 nt, Artificial Sequence
  Synthetic oligonucleotide
cgucaaauuaaucaaaaga

SEQ ID NO: 215 - RNA, 19 nt, Artificial Sequence
  Synthetic oligonucleotide
ucuuuugauuaauuugacg

SEQ ID NO: 216 - RNA, 19 nt, Artificial Sequence
  Synthetic oligonucleotide
gucaaauuaaucaaaagga

SEQ ID NO: 217 - RNA, 19 nt, Artificial Sequence
  Synthetic oligonucleotide
uccuuuugauuaauuugac

SEQ ID NO: 218 - RNA, 19 nt, Artificial Sequence
  Synthetic oligonucleotide
uuaaucaaaaggacacaaa

SEQ ID NO: 219 - RNA, 19 nt, Artificial Sequence
  Synthetic oligonucleotide
uuuguguccuuuugauuaa

SEQ ID NO: 220 - RNA, 19 nt, Artificial Sequence
  Synthetic oligonucleotide
uaaucaaaaggacacaaca

SEQ ID NO: 221 - RNA, 19 nt, Artificial Sequence
  Synthetic oligonucleotide
uguuguguccuuuugauua

SEQ ID NO: 222 - RNA, 19 nt, Artificial Sequence
  Synthetic oligonucleotide
caaaaggacacaacacuua

SEQ ID NO: 223 - RNA, 19 nt, Artificial Sequence
  Synthetic oligonucleotide
uaaguguuguguccuuuug

SEQ ID NO: 224 - RNA, 19 nt, Artificial Sequence
  Synthetic oligonucleotide
aaaggacacaacacuuuua

SEQ ID NO: 225 - RNA, 19 nt, Artificial Sequence
  Synthetic oligonucleotide
uaaaaguguuguguccuuu

SEQ ID NO: 226 - RNA, 19 nt, Artificial Sequence
  Synthetic oligonucleotide
uuuugaucucagucaguua

SEQ ID NO: 227 - RNA, 19 nt, Artificial Sequence
  Synthetic oligonucleotide
uaacugacugagaucaaaa

SEQ ID NO: 228 - RNA, 19 nt, Artificial Sequence
  Synthetic oligonucleotide
ugaucucagucaguuugga

SEQ ID NO: 229 - RNA, 19 nt, Artificial Sequence
  Synthetic oligonucleotide
uccaaacugacugagauca

SEQ ID NO: 230 - RNA, 19 nt, Artificial Sequence
  Synthetic oligonucleotide
aucucagucaguuuggaua

SEQ ID NO: 231 - RNA, 19 nt, Artificial Sequence
  Synthetic oligonucleotide
uauccaaacugacugagau

SEQ ID NO: 232 - RNA, 19 nt, Artificial Sequence
  Synthetic oligonucleotide
cucagucaguuuggaucaa

SEQ ID NO: 233 - RNA, 19 nt, Artificial Sequence
  Synthetic oligonucleotide
uugauccaaacugacugag

SEQ ID NO: 234 - RNA, 19 nt, Artificial Sequence
  Synthetic oligonucleotide
ucagucaguuuggaucaua

SEQ ID NO: 235 - RNA, 19 nt, Artificial Sequence
  Synthetic oligonucleotide
uaugauccaaacugacuga

SEQ ID NO: 236 - RNA, 19 nt, Artificial Sequence
  Synthetic oligonucleotide
cagucaguuuggaucauca

SEQ ID NO: 237 - RNA, 19 nt, Artificial Sequence
  Synthetic oligonucleotide
ugaugauccaaacugacug

SEQ ID NO: 238 - RNA, 19 nt, Artificial Sequence
  Synthetic oligonucleotide
agucaguuuggaucaucaa

SEQ ID NO: 239 - RNA, 19 nt, Artificial Sequence
  Synthetic oligonucleotide
uugaugauccaaacugacu

SEQ ID NO: 240 - RNA, 19 nt, Artificial Sequence
  Synthetic oligonucleotide
caguuuggaucaucaaaua

SEQ ID NO: 241 - RNA, 19 nt, Artificial Sequence
  Synthetic oligonucleotide
uauuugaugauccaaacug

SEQ ID NO: 242 - RNA, 19 nt, Artificial Sequence
  Synthetic oligonucleotide
aguuuggaucaucaaauaa

SEQ ID NO: 243 - RNA, 19 nt, Artificial Sequence
  Synthetic oligonucleotide
uuauuugaugauccaaacu

SEQ ID NO: 244 - RNA, 19 nt, Artificial Sequence
  Synthetic oligonucleotide
guuuggaucaucaaauaca

SEQ ID NO: 245 - RNA, 19 nt, Artificial Sequence
  Synthetic oligonucleotide
uguauuugaugauccaaac

SEQ ID NO: 246 - RNA, 19 nt, Artificial Sequence
  Synthetic oligonucleotide
uuuggaucaucaaauacaa

SEQ ID NO: 247 - RNA, 19 nt, Artificial Sequence
  Synthetic oligonucleotide
uuguauuugaugauccaaa

SEQ ID NO: 248 - RNA, 19 nt, Artificial Sequence
  Synthetic oligonucleotide
uuggaucaucaaauacaaa

SEQ ID NO: 249 - RNA, 19 nt, Artificial Sequence
  Synthetic oligonucleotide
uuuguauuugaugauccaa

SEQ ID NO: 250 - RNA, 19 nt, Artificial Sequence
  Synthetic oligonucleotide
uggaucaucaaauacaaga

SEQ ID NO: 251 - RNA, 19 nt, Artificial Sequence
  Synthetic oligonucleotide
ucuuguauuugaugaucca

SEQ ID NO: 252 - RNA, 19 nt, Artificial Sequence
  Synthetic oligonucleotide
ggaucaucaaauacaagua

SEQ ID NO: 253 - RNA, 19 nt, Artificial Sequence
  Synthetic oligonucleotide
uacuuguauuugaugaucc

SEQ ID NO: 254 - RNA, 19 nt, Artificial Sequence
  Synthetic oligonucleotide
caucaaauacaagucauga

SEQ ID NO: 255 - RNA, 19 nt, Artificial Sequence
  Synthetic oligonucleotide
ucaugacuuguauuugaug

SEQ ID NO: 256 - RNA, 19 nt, Artificial Sequence
  Synthetic oligonucleotide
ucaaauacaagucaugaaa

SEQ ID NO: 257 - RNA, 19 nt, Artificial Sequence
  Synthetic oligonucleotide
uuucaugacuuguauuuga

SEQ ID NO: 258 - RNA, 19 nt, Artificial Sequence
  Synthetic oligonucleotide
auacaagucaugaaaauua

SEQ ID NO: 259 - RNA, 19 nt, Artificial Sequence
  Synthetic oligonucleotide
uaauuuucaugacuuguau

SEQ ID NO: 260 - RNA, 19 nt, Artificial Sequence
  Synthetic oligonucleotide
uacaagucaugaaaauuua

SEQ ID NO: 261 - RNA, 19 nt, Artificial Sequence
  Synthetic oligonucleotide
uaaauuuucaugacuugua

SEQ ID NO: 262 - RNA, 19 nt, Artificial Sequence
  Synthetic oligonucleotide
uacagaaaacugcuuccaa

SEQ ID NO: 263 - RNA, 19 nt, Artificial Sequence
  Synthetic oligonucleotide
uuggaagcaguuuucugua

SEQ ID NO: 264 - RNA, 19 nt, Artificial Sequence
  Synthetic oligonucleotide
aaaacugcuuccaaaucaa

SEQ ID NO: 265 - RNA, 19 nt, Artificial Sequence
  Synthetic oligonucleotide
uugauuuggaagcaguuuu

SEQ ID NO: 266 - RNA, 19 nt, Artificial Sequence
  Synthetic oligonucleotide
aacugcuuccaaaucagca

SEQ ID NO: 267 - RNA, 19 nt, Artificial Sequence
  Synthetic oligonucleotide
ugcugauuuggaagcaguu

SEQ ID NO: 268 - RNA, 19 nt, Artificial Sequence
  Synthetic oligonucleotide
acugcuuccaaaucagcua

SEQ ID NO: 269 - RNA, 19 nt, Artificial Sequence
  Synthetic oligonucleotide
uagcugauuuggaagcagu

SEQ ID NO: 270 - RNA, 19 nt, Artificial Sequence
  Synthetic oligonucleotide
cugcuuccaaaucagcuaa

SEQ ID NO: 271 - RNA, 19 nt, Artificial Sequence
  Synthetic oligonucleotide
uuagcugauuuggaagcag

SEQ ID NO: 272 - RNA, 19 nt, Artificial Sequence
  Synthetic oligonucleotide
gcuuccaaaucagcuaaca

SEQ ID NO: 273 - RNA, 19 nt, Artificial Sequence
  Synthetic oligonucleotide
uguuagcugauuuggaagc

SEQ ID NO: 274 - RNA, 19 nt, Artificial Sequence
  Synthetic oligonucleotide
cuuccaaaucagcuaacaa

SEQ ID NO: 275 - RNA, 19 nt, Artificial Sequence
  Synthetic oligonucleotide
uuguuagcugauuuggaag

SEQ ID NO: 276 - RNA, 19 nt, Artificial Sequence
  Synthetic oligonucleotide
ccaaaucagcuaacaaaca

SEQ ID NO: 277 - RNA, 19 nt, Artificial Sequence
  Synthetic oligonucleotide
uguuuguuagcugauuugg

SEQ ID NO: 278 - RNA, 19 nt, Artificial Sequence
  Synthetic oligonucleotide
aaaucagcuaacaaacgga

SEQ ID NO: 279 - RNA, 19 nt, Artificial Sequence
  Synthetic oligonucleotide
uccguuuguuagcugauuu

SEQ ID NO: 280 - RNA, 19 nt, Artificial Sequence
  Synthetic oligonucleotide
aaucagcuaacaaacggua

SEQ ID NO: 281 - RNA, 19 nt, Artificial Sequence
  Synthetic oligonucleotide
uaccguuuguuagcugauu

SEQ ID NO: 282 - RNA, 19 nt, Artificial Sequence
  Synthetic oligonucleotide
gcuaacaaacgguccaaaa

SEQ ID NO: 283 - RNA, 19 nt, Artificial Sequence
  Synthetic oligonucleotide
uuuuggaccguuuguuagc

SEQ ID NO: 284 - RNA, 19 nt, Artificial Sequence
  Synthetic oligonucleotide
uaacaaacgguccaaaaga

SEQ ID NO: 285 - RNA, 19 nt, Artificial Sequence
  Synthetic oligonucleotide
ucuuuuggaccguuuguua

SEQ ID NO: 286 - RNA, 19 nt, Artificial Sequence
  Synthetic oligonucleotide
aacaaacgguccaaaagca

SEQ ID NO: 287 - RNA, 19 nt, Artificial Sequence
  Synthetic oligonucleotide
ugcuuuuggaccguuuguu

SEQ ID NO: 288 - RNA, 19 nt, Artificial Sequence
  Synthetic oligonucleotide
aaacgguccaaaagcauca

SEQ ID NO: 289 - RNA, 19 nt, Artificial Sequence
  Synthetic oligonucleotide
ugaugcuuuuggaccguuu

SEQ ID NO: 290 - RNA, 19 nt, Artificial Sequence
  Synthetic oligonucleotide
aacgguccaaaagcaucua

SEQ ID NO: 291 - RNA, 19 nt, Artificial Sequence
  Synthetic oligonucleotide
uagaugcuuuuggaccguu

SEQ ID NO: 292 - RNA, 19 nt, Artificial Sequence
  Synthetic oligonucleotide
cgguccaaaagcaucuaua

SEQ ID NO: 293 - RNA, 19 nt, Artificial Sequence
  Synthetic oligonucleotide
uauagaugcuuuuggaccg

SEQ ID NO: 294 - RNA, 19 nt, Artificial Sequence
  Synthetic oligonucleotide
uccaaaagcaucuauacga

SEQ ID NO: 295 - RNA, 19 nt, Artificial Sequence
  Synthetic oligonucleotide
ucguauagaugcuuuugga

SEQ ID NO: 296 - RNA, 19 nt, Artificial Sequence
  Synthetic oligonucleotide
ccaaaagcaucuauacgca

SEQ ID NO: 297 - RNA, 19 nt, Artificial Sequence
  Synthetic oligonucleotide
ugcguauagaugcuuuugg

SEQ ID NO: 298 - RNA, 19 nt, Artificial Sequence
  Synthetic oligonucleotide
aucuauacgccgcuagaaa

SEQ ID NO: 299 - RNA, 19 nt, Artificial Sequence
  Synthetic oligonucleotide
uuucuagcggcguauagau

SEQ ID NO: 300 - RNA, 19 nt, Artificial Sequence
  Synthetic oligonucleotide
cuauacgccgcuagaauua

SEQ ID NO: 301 - RNA, 19 nt, Artificial Sequence
  Synthetic oligonucleotide
uaauucuagcggcguauag

SEQ ID NO: 302 - RNA, 19 nt, Artificial Sequence
  Synthetic oligonucleotide
uauacgccgcuagaauuaa

SEQ ID NO: 303 - RNA, 19 nt, Artificial Sequence
  Synthetic oligonucleotide
uuaauucuagcggcguaua

SEQ ID NO: 304 - RNA, 19 nt, Artificial Sequence
  Synthetic oligonucleotide
auacgccgcuagaauuaca

SEQ ID NO: 305 - RNA, 19 nt, Artificial Sequence
  Synthetic oligonucleotide
uguaauucuagcggcguau

SEQ ID NO: 306 - RNA, 19 nt, Artificial Sequence
  Synthetic oligonucleotide
acgccgcuagaauuacaaa

SEQ ID NO: 307 - RNA, 19 nt, Artificial Sequence
  Synthetic oligonucleotide
uuuguaauucuagcggcgu

SEQ ID NO: 308 - RNA, 19 nt, Artificial Sequence
  Synthetic oligonucleotide
ccgcuagaauuacaauaca

SEQ ID NO: 309 - RNA, 19 nt, Artificial Sequence
  Synthetic oligonucleotide
uguauuguaauucuagcgg

SEQ ID NO: 310 - RNA, 19 nt, Artificial Sequence
  Synthetic oligonucleotide
cgcuagaauuacaauacaa

SEQ ID NO: 311 - RNA, 19 nt, Artificial Sequence
  Synthetic oligonucleotide
uuguauuguaauucuagcg

SEQ ID NO: 312 - RNA, 19 nt, Artificial Sequence
  Synthetic oligonucleotide
uagaauuacaauacauaga

SEQ ID NO: 313 - RNA, 19 nt, Artificial Sequence
  Synthetic oligonucleotide
ucuauguauuguaauucua

SEQ ID NO: 314 - RNA, 19 nt, Artificial Sequence
  Synthetic oligonucleotide
agaauuacaauacauagaa

SEQ ID NO: 315 - RNA, 19 nt, Artificial Sequence
  Synthetic oligonucleotide
uucuauguauuguaauucu

SEQ ID NO: 316 - RNA, 19 nt, Artificial Sequence
  Synthetic oligonucleotide
gaauuacaauacauagaaa

SEQ ID NO: 317 - RNA, 19 nt, Artificial Sequence
  Synthetic oligonucleotide
uuucuauguauuguaauuc

SEQ ID NO: 318 - RNA, 19 nt, Artificial Sequence
  Synthetic oligonucleotide
aauuacaauacauagaaaa

SEQ ID NO: 319 - RNA, 19 nt, Artificial Sequence
  Synthetic oligonucleotide
uuuucuauguauuguaauu

SEQ ID NO: 320 - RNA, 19 nt, Artificial Sequence
  Synthetic oligonucleotide
auacauagaaaugaagcaa

SEQ ID NO: 321 - RNA, 19 nt, Artificial Sequence
  Synthetic oligonucleotide
uugcuucauuucuauguau

SEQ ID NO: 322 - RNA, 19 nt, Artificial Sequence
  Synthetic oligonucleotide
uacauagaaaugaagcaga

SEQ ID NO: 323 - RNA, 19 nt, Artificial Sequence
  Synthetic oligonucleotide
ucugcuucauuucuaugua

SEQ ID NO: 324 - RNA, 19 nt, Artificial Sequence
  Synthetic oligonucleotide
gcacaaagaugcaguuuua

SEQ ID NO: 325 - RNA, 19 nt, Artificial Sequence
  Synthetic oligonucleotide
uaaaacugcaucuuugugc

SEQ ID NO: 326 - RNA, 19 nt, Artificial Sequence
  Synthetic oligonucleotide
cacaaagaugcaguuuuga

SEQ ID NO: 327 - RNA, 19 nt, Artificial Sequence
  Synthetic oligonucleotide
ucaaaacugcaucuuugug

SEQ ID NO: 328 - RNA, 19 nt, Artificial Sequence
  Synthetic oligonucleotide
caaagaugcaguuuuguga

SEQ ID NO: 329 - RNA, 19 nt, Artificial Sequence
  Synthetic oligonucleotide
ucacaaaacugcaucuuug

SEQ ID NO: 330 - RNA, 19 nt, Artificial Sequence
  Synthetic oligonucleotide
aagaugcaguuuuguguga

SEQ ID NO: 331 - RNA, 19 nt, Artificial Sequence
  Synthetic oligonucleotide
ucacacaaaacugcaucuu

SEQ ID NO: 332 - RNA, 19 nt, Artificial Sequence
  Synthetic oligonucleotide
agaugcaguuuugugugua

SEQ ID NO: 333 - RNA, 19 nt, Artificial Sequence
  Synthetic oligonucleotide
uacacacaaaacugcaucu

SEQ ID NO: 334 - RNA, 19 nt, Artificial Sequence
  Synthetic oligonucleotide
gaugcaguuuuguguguga

SEQ ID NO: 335 - RNA, 19 nt, Artificial Sequence
  Synthetic oligonucleotide
ucacacacaaaacugcauc

SEQ ID NO: 336 - RNA, 19 nt, Artificial Sequence
  Synthetic oligonucleotide
ugcaguuuuguguguggaa

SEQ ID NO: 337 - RNA, 19 nt, Artificial Sequence
  Synthetic oligonucleotide
uuccacacacaaaacugca

SEQ ID NO: 338 - RNA, 19 nt, Artificial Sequence
  Synthetic oligonucleotide
gcaguuuuguguguggaaa

SEQ ID NO: 339 - RNA, 19 nt, Artificial Sequence
  Synthetic oligonucleotide
uuuccacacacaaaacugc

SEQ ID NO: 340 - RNA, 19 nt, Artificial Sequence
  Synthetic oligonucleotide
aguuuuguguguggaauga

SEQ ID NO: 341 - RNA, 19 nt, Artificial Sequence
  Synthetic oligonucleotide
ucauuccacacacaaaacu

SEQ ID NO: 342 - RNA, 19 nt, Artificial Sequence
  Synthetic oligonucleotide
guuuuguguguggaaugua

SEQ ID NO: 343 - RNA, 19 nt, Artificial Sequence
  Synthetic oligonucleotide
uacauuccacacacaaaac

SEQ ID NO: 344 - RNA, 19 nt, Artificial Sequence
  Synthetic oligonucleotide
uuuuguguguggaauguga

SEQ ID NO: 345 - RNA, 19 nt, Artificial Sequence
  Synthetic oligonucleotide
ucacauuccacacacaaaa

SEQ ID NO: 346 - RNA, 19 nt, Artificial Sequence
  Synthetic oligonucleotide
uuuguguguggaaugugga

SEQ ID NO: 347 - RNA, 19 nt, Artificial Sequence
  Synthetic oligonucleotide
uccacauuccacacacaaa

SEQ ID NO: 348 - RNA, 19 nt, Artificial Sequence
  Synthetic oligonucleotide
uuguguguggaauguggaa

SEQ ID NO: 349 - RNA, 19 nt, Artificial Sequence
  Synthetic oligonucleotide
uuccacauuccacacacaa

SEQ ID NO: 350 - RNA, 19 nt, Artificial Sequence
  Synthetic oligonucleotide
uguguguggaauguggaua

SEQ ID NO: 351 - RNA, 19 nt, Artificial Sequence
  Synthetic oligonucleotide
uauccacauuccacacaca

SEQ ID NO: 352 - RNA, 19 nt, Artificial Sequence
  Synthetic oligonucleotide
guguguggaauguggauaa

SEQ ID NO: 353 - RNA, 19 nt, Artificial Sequence
  Synthetic oligonucleotide
uuauccacauuccacacac

SEQ ID NO: 354 - RNA, 19 nt, Artificial Sequence
  Synthetic oligonucleotide
guguggaauguggauauaa

SEQ ID NO: 355 - RNA, 19 nt, Artificial Sequence
  Synthetic oligonucleotide
uuauauccacauuccacac

SEQ ID NO: 356 - RNA, 19 nt, Artificial Sequence
  Synthetic oligonucleotide
uguggaauguggauauaaa

SEQ ID NO: 357 - RNA, 19 nt, Artificial Sequence
  Synthetic oligonucleotide
uuuauauccacauuccaca

SEQ ID NO: 358 - RNA, 19 nt, Artificial Sequence
  Synthetic oligonucleotide
guggaauguggauauaaga

SEQ ID NO: 359 - RNA, 19 nt, Artificial Sequence
  Synthetic oligonucleotide
ucuuauauccacauuccac

SEQ ID NO: 360 - RNA, 19 nt, Artificial Sequence
  Synthetic oligonucleotide
uggaauguggauauaagua

SEQ ID NO: 361 - RNA, 19 nt, Artificial Sequence
  Synthetic oligonucleotide
uacuuauauccacauucca

SEQ ID NO: 362 - RNA, 19 nt, Artificial Sequence
  Synthetic oligonucleotide
ggaauguggauauaaguaa

SEQ ID NO: 363 - RNA, 19 nt, Artificial Sequence
  Synthetic oligonucleotide
uuacuuauauccacauucc

SEQ ID NO: 364 - RNA, 19 nt, Artificial Sequence
  Synthetic oligonucleotide
gaauguggauauaaguaua

SEQ ID NO: 365 - RNA, 19 nt, Artificial Sequence
  Synthetic oligonucleotide
uauacuuauauccacauuc

SEQ ID NO: 366 - RNA, 19 nt, Artificial Sequence
  Synthetic oligonucleotide
aauguggauauaaguauaa

SEQ ID NO: 367 - RNA, 19 nt, Artificial Sequence
  Synthetic oligonucleotide
uuauacuuauauccacauu

SEQ ID NO: 368 - RNA, 19 nt, Artificial Sequence
  Synthetic oligonucleotide
auguggauauaaguauaga

SEQ ID NO: 369 - RNA, 19 nt, Artificial Sequence
  Synthetic oligonucleotide
ucuauacuuauauccacau

SEQ ID NO: 370 - RNA, 19 nt, Artificial Sequence
  Synthetic oligonucleotide
uguggauauaaguauagaa

SEQ ID NO: 371 - RNA, 19 nt, Artificial Sequence
  Synthetic oligonucleotide
uucuauacuuauauccaca

SEQ ID NO: 372 - RNA, 19 nt, Artificial Sequence
  Synthetic oligonucleotide
uggauauaaguauagauua

SEQ ID NO: 373 - RNA, 19 nt, Artificial Sequence
  Synthetic oligonucleotide
uaaucuauacuuauaucca

SEQ ID NO: 374 - RNA, 19 nt, Artificial Sequence
  Synthetic oligonucleotide
gauauaaguauagauucua

SEQ ID NO: 375 - RNA, 19 nt, Artificial Sequence
  Synthetic oligonucleotide
uagaaucuauacuuauauc

SEQ ID NO: 376 - RNA, 19 nt, Artificial Sequence
  Synthetic oligonucleotide
uauaaguauagauucuuua

SEQ ID NO: 377 - RNA, 19 nt, Artificial Sequence
  Synthetic oligonucleotide
uaaagaaucuauacuuaua

SEQ ID NO: 378 - RNA, 19 nt, Artificial Sequence
  Synthetic oligonucleotide
uaaguauagauucuuugga

SEQ ID NO: 379 - RNA, 19 nt, Artificial Sequence
  Synthetic oligonucleotide
uccaaagaaucuauacuua

SEQ ID NO: 380 - RNA, 19 nt, Artificial Sequence
  Synthetic oligonucleotide
aaguauagauucuuuggga

SEQ ID NO: 381 - RNA, 19 nt, Artificial Sequence
  Synthetic oligonucleotide
ucccaaagaaucuauacuu

SEQ ID NO: 382 - RNA, 19 nt, Artificial Sequence
  Synthetic oligonucleotide
uauagauucuuuggggaaa

SEQ ID NO: 383 - RNA, 19 nt, Artificial Sequence
  Synthetic oligonucleotide
uuuccccaaagaaucuaua

SEQ ID NO: 384 - RNA, 19 nt, Artificial Sequence
  Synthetic oligonucleotide
agauucuuuggggaagaua

SEQ ID NO: 385 - RNA, 19 nt, Artificial Sequence
  Synthetic oligonucleotide
uaucuuccccaaagaaucu

SEQ ID NO: 386 - RNA, 19 nt, Artificial Sequence
  Synthetic oligonucleotide
ugcagcccgagagcucaaa

SEQ ID NO: 387 - RNA, 19 nt, Artificial Sequence
  Synthetic oligonucleotide
uuugagcucucgggcugca

SEQ ID NO: 388 - RNA, 19 nt, Artificial Sequence
  Synthetic oligonucleotide
agcccgagagcucaauaua

SEQ ID NO: 389 - RNA, 19 nt, Artificial Sequence
  Synthetic oligonucleotide
uauauugagcucucgggcu

SEQ ID NO: 390 - RNA, 19 nt, Artificial Sequence
  Synthetic oligonucleotide
gcccgagagcucaauauua

SEQ ID NO: 391 - RNA, 19 nt, Artificial Sequence
  Synthetic oligonucleotide
uaauauugagcucucgggc

SEQ ID NO: 392 - RNA, 19 nt, Artificial Sequence
  Synthetic oligonucleotide
cgagagcucaauauuuaua

SEQ ID NO: 393 - RNA, 19 nt, Artificial Sequence
  Synthetic oligonucleotide
uauaaauauugagcucucg

SEQ ID NO: 394 - RNA, 19 nt, Artificial Sequence
  Synthetic oligonucleotide
gagagcucaauauuuauua

SEQ ID NO: 395 - RNA, 19 nt, Artificial Sequence
  Synthetic oligonucleotide
uaauaaauauugagcucuc

SEQ ID NO: 396 - RNA, 19 nt, Artificial Sequence
  Synthetic oligonucleotide
gagcucaauauuuauugca

SEQ ID NO: 397 - RNA, 19 nt, Artificial Sequence
  Synthetic oligonucleotide
ugcaauaaauauugagcuc

SEQ ID NO: 398 - RNA, 19 nt, Artificial Sequence
  Synthetic oligonucleotide
cucaauauuuauugccaua

SEQ ID NO: 399 - RNA, 19 nt, Artificial Sequence
  Synthetic oligonucleotide
uauggcaauaaauauugag

SEQ ID NO: 400 - RNA, 19 nt, Artificial Sequence
  Synthetic oligonucleotide
uauuuauugccauuuagaa

SEQ ID NO: 401 - RNA, 19 nt, Artificial Sequence
  Synthetic oligonucleotide
uucuaaauggcaauaaaua

SEQ ID NO: 402 - RNA, 19 nt, Artificial Sequence
  Synthetic oligonucleotide
uuuauugccauuuagauca

SEQ ID NO: 403 - RNA, 19 nt, Artificial Sequence
  Synthetic oligonucleotide
ugaucuaaauggcaauaaa

SEQ ID NO: 404 - RNA, 19 nt, Artificial Sequence
  Synthetic oligonucleotide
uuauugccauuuagaucaa

SEQ ID NO: 405 - RNA, 19 nt, Artificial Sequence
  Synthetic oligonucleotide
uugaucuaaauggcaauaa

SEQ ID NO: 406 - RNA, 19 nt, Artificial Sequence
  Synthetic oligonucleotide
uauugccauuuagaucaca

SEQ ID NO: 407 - RNA, 19 nt, Artificial Sequence
  Synthetic oligonucleotide
ugugaucuaaauggcaaua

SEQ ID NO: 408 - RNA, 19 nt, Artificial Sequence
  Synthetic oligonucleotide
auugccauuuagaucacaa

SEQ ID NO: 409 - RNA, 19 nt, Artificial Sequence
  Synthetic oligonucleotide
uugugaucuaaauggcaau

SEQ ID NO: 410 - RNA, 19 nt, Artificial Sequence
  Synthetic oligonucleotide
uugccauuuagaucacaaa

SEQ ID NO: 411 - RNA, 19 nt, Artificial Sequence
  Synthetic oligonucleotide
uuugugaucuaaauggcaa

SEQ ID NO: 412 - RNA, 19 nt, Artificial Sequence
  Synthetic oligonucleotide
gccauuuagaucacaacua

SEQ ID NO: 413 - RNA, 19 nt, Artificial Sequence
  Synthetic oligonucleotide
uaguugugaucuaaauggc

SEQ ID NO: 414 - RNA, 19 nt, Artificial Sequence
  Synthetic oligonucleotide
uuuagaucacaacuuuaua

SEQ ID NO: 415 - RNA, 19 nt, Artificial Sequence
  Synthetic oligonucleotide
uauaaaguugugaucuaaa

SEQ ID NO: 416 - RNA, 19 nt, Artificial Sequence
  Synthetic oligonucleotide
uuagaucacaacuuuauga

SEQ ID NO: 417 - RNA, 19 nt, Artificial Sequence
  Synthetic oligonucleotide
ucauaaaguugugaucuaa

SEQ ID NO: 418 - RNA, 19 nt, Artificial Sequence
  Synthetic oligonucleotide
uagaucacaacuuuaugaa

SEQ ID NO: 419 - RNA, 19 nt, Artificial Sequence
  Synthetic oligonucleotide
uucauaaaguugugaucua

SEQ ID NO: 420 - RNA, 19 nt, Artificial Sequence
  Synthetic oligonucleotide
agaucacaacuuuaugaca

SEQ ID NO: 421 - RNA, 19 nt, Artificial Sequence
  Synthetic oligonucleotide
ugucauaaaguugugaucu

SEQ ID NO: 422 - RNA, 19 nt, Artificial Sequence
  Synthetic oligonucleotide
aucacaacuuuaugacaga

SEQ ID NO: 423 - RNA, 19 nt, Artificial Sequence
  Synthetic oligonucleotide
ucugucauaaaguugugau

SEQ ID NO: 424 - RNA, 19 nt, Artificial Sequence
  Synthetic oligonucleotide
ucacaacuuuaugacagca

SEQ ID NO: 425 - RNA, 19 nt, Artificial Sequence
  Synthetic oligonucleotide
ugcugucauaaaguuguga

SEQ ID NO: 426 - RNA, 19 nt, Artificial Sequence
  Synthetic oligonucleotide
cacaacuuuaugacagcaa

SEQ ID NO: 427 - RNA, 19 nt, Artificial Sequence
  Synthetic oligonucleotide
uugcugucauaaaguugug

SEQ ID NO: 428 - RNA, 19 nt, Artificial Sequence
  Synthetic oligonucleotide
acaacuuuaugacagcaaa

SEQ ID NO: 429 - RNA, 19 nt, Artificial Sequence
  Synthetic oligonucleotide
uuugcugucauaaaguugu

SEQ ID NO: 430 - RNA, 19 nt, Artificial Sequence
  Synthetic oligonucleotide
caacuuuaugacagcaaga

SEQ ID NO: 431 - RNA, 19 nt, Artificial Sequence
  Synthetic oligonucleotide
ucuugcugucauaaaguug

SEQ ID NO: 432 - RNA, 19 nt, Artificial Sequence
  Synthetic oligonucleotide
aacuuuaugacagcaagua

SEQ ID NO: 433 - RNA, 19 nt, Artificial Sequence
  Synthetic oligonucleotide
uacuugcugucauaaaguu

SEQ ID NO: 434 - RNA, 19 nt, Artificial Sequence
  Synthetic oligonucleotide
cuuuaugacagcaaguaua

SEQ ID NO: 435 - RNA, 19 nt, Artificial Sequence
  Synthetic oligonucleotide
uauacuugcugucauaaag

SEQ ID NO: 436 - RNA, 19 nt, Artificial Sequence
  Synthetic oligonucleotide
augacagcaaguauaccua

SEQ ID NO: 437 - RNA, 19 nt, Artificial Sequence
  Synthetic oligonucleotide
uagguauacuugcugucau

SEQ ID NO: 438 - RNA, 19 nt, Artificial Sequence
  Synthetic oligonucleotide
ugacagcaaguauaccuaa

SEQ ID NO: 439 - RNA, 19 nt, Artificial Sequence
  Synthetic oligonucleotide
uuagguauacuugcuguca

SEQ ID NO: 440 - RNA, 19 nt, Artificial Sequence
  Synthetic oligonucleotide
gacagcaaguauaccuaca

SEQ ID NO: 441 - RNA, 19 nt, Artificial Sequence
  Synthetic oligonucleotide
uguagguauacuugcuguc

SEQ ID NO: 442 - RNA, 19 nt, Artificial Sequence
  Synthetic oligonucleotide
cagcaaguauaccuacuca

SEQ ID NO: 443 - RNA, 19 nt, Artificial Sequence
  Synthetic oligonucleotide
ugaguagguauacuugcug

SEQ ID NO: 444 - RNA, 19 nt, Artificial Sequence
  Synthetic oligonucleotide
gcaaguauaccuacucaca

SEQ ID NO: 445 - RNA, 19 nt, Artificial Sequence
  Synthetic oligonucleotide
ugugaguagguauacuugc

SEQ ID NO: 446 - RNA, 19 nt, Artificial Sequence
  Synthetic oligonucleotide
aguauaccuacucacagaa

SEQ ID NO: 447 - RNA, 19 nt, Artificial Sequence
  Synthetic oligonucleotide
uucugugaguagguauacu

SEQ ID NO: 448 - RNA, 19 nt, Artificial Sequence
  Synthetic oligonucleotide
guauaccuacucacagaca

SEQ ID NO: 449 - RNA, 19 nt, Artificial Sequence
  Synthetic oligonucleotide
ugucugugaguagguauac

SEQ ID NO: 450 - RNA, 19 nt, Artificial Sequence
  Synthetic oligonucleotide
auaccuacucacagacuga

SEQ ID NO: 451 - RNA, 19 nt, Artificial Sequence
  Synthetic oligonucleotide
ucagucugugaguagguau

SEQ ID NO: 452 - RNA, 19 nt, Artificial Sequence
  Synthetic oligonucleotide
uaccuacucacagacugua

SEQ ID NO: 453 - RNA, 19 nt, Artificial Sequence
  Synthetic oligonucleotide
uacagucugugaguaggua

SEQ ID NO: 454 - RNA, 19 nt, Artificial Sequence
  Synthetic oligonucleotide
accuacucacagacuguua

SEQ ID NO: 455 - RNA, 19 nt, Artificial Sequence
  Synthetic oligonucleotide
uaacagucugugaguaggu

SEQ ID NO: 456 - RNA, 19 nt, Artificial Sequence
  Synthetic oligonucleotide
acucacagacuguuuguua

SEQ ID NO: 457 - RNA, 19 nt, Artificial Sequence
  Synthetic oligonucleotide
uaacaaacagucugugagu

SEQ ID NO: 458 - RNA, 19 nt, Artificial Sequence
  Synthetic oligonucleotide
cucacagacuguuuguuca

SEQ ID NO: 459 - RNA, 19 nt, Artificial Sequence
  Synthetic oligonucleotide
ugaacaaacagucugugag

SEQ ID NO: 460 - RNA, 19 nt, Artificial Sequence
  Synthetic oligonucleotide
cacagacuguuuguucaua

SEQ ID NO: 461 - RNA, 19 nt, Artificial Sequence
  Synthetic oligonucleotide
uaugaacaaacagucugug

SEQ ID NO: 462 - RNA, 19 nt, Artificial Sequence
  Synthetic oligonucleotide
acagacuguuuguucauga

SEQ ID NO: 463 - RNA, 19 nt, Artificial Sequence
  Synthetic oligonucleotide
ucaugaacaaacagucugu

SEQ ID NO: 464 - RNA, 19 nt, Artificial Sequence
  Synthetic oligonucleotide
acuguuuguucauguacga

SEQ ID NO: 465 - RNA, 19 nt, Artificial Sequence
  Synthetic oligonucleotide
ucguacaugaacaaacagu

SEQ ID NO: 466 - RNA, 19 nt, Artificial Sequence
  Synthetic oligonucleotide
cuguuuguucauguacgca

SEQ ID NO: 467 - RNA, 19 nt, Artificial Sequence
  Synthetic oligonucleotide
ugcguacaugaacaaacag

SEQ ID NO: 468 - RNA, 19 nt, Artificial Sequence
  Synthetic oligonucleotide
cgccugguggcaaaaggaa

SEQ ID NO: 469 - RNA, 19 nt, Artificial Sequence
  Synthetic oligonucleotide
uuccuuuugccaccaggcg

SEQ ID NO: 470 - RNA, 19 nt, Artificial Sequence
  Synthetic oligonucleotide
cugguggcaaaaggauaua

SEQ ID NO: 471 - RNA, 19 nt, Artificial Sequence
  Synthetic oligonucleotide
uauauccuuuugccaccag

SEQ ID NO: 472 - RNA, 19 nt, Artificial Sequence
  Synthetic oligonucleotide
ugguggcaaaaggauauaa

SEQ ID NO: 473 - RNA, 19 nt, Artificial Sequence
  Synthetic oligonucleotide
uuauauccuuuugccacca

SEQ ID NO: 474 - RNA, 19 nt, Artificial Sequence
  Synthetic oligonucleotide
gguggcaaaaggauauaaa

SEQ ID NO: 475 - RNA, 19 nt, Artificial Sequence
  Synthetic oligonucleotide
uuuauauccuuuugccacc

SEQ ID NO: 476 - RNA, 19 nt, Artificial Sequence
  Synthetic oligonucleotide
guggcaaaaggauauaaga

SEQ ID NO: 477 - RNA, 19 nt, Artificial Sequence
  Synthetic oligonucleotide
ucuuauauccuuuugccac

SEQ ID NO: 478 - RNA, 19 nt, Artificial Sequence
  Synthetic oligonucleotide
uggcaaaaggauauaagga

SEQ ID NO: 479 - RNA, 19 nt, Artificial Sequence
  Synthetic oligonucleotide
uccuuauauccuuuugcca

SEQ ID NO: 480 - RNA, 19 nt, Artificial Sequence
  Synthetic oligonucleotide
ggcaaaaggauauaaggua

SEQ ID NO: 481 - RNA, 19 nt, Artificial Sequence
  Synthetic oligonucleotide
uaccuuauauccuuuugcc

SEQ ID NO: 482 - RNA, 19 nt, Artificial Sequence
  Synthetic oligonucleotide
gcaaaaggauauaagguga

SEQ ID NO: 483 - RNA, 19 nt, Artificial Sequence
  Synthetic oligonucleotide
ucaccuuauauccuuuugc

SEQ ID NO: 484 - RNA, 19 nt, Artificial Sequence
  Synthetic oligonucleotide
caaaaggauauaaggugga

SEQ ID NO: 485 - RNA, 19 nt, Artificial Sequence
  Synthetic oligonucleotide
uccaccuuauauccuuuug

SEQ ID NO: 486 - RNA, 19 nt, Artificial Sequence
  Synthetic oligonucleotide
ggauauaaggugggaguua

SEQ ID NO: 487 - RNA, 19 nt, Artificial Sequence
  Synthetic oligonucleotide
uaacucccaccuuauaucc

SEQ ID NO: 488 - RNA, 19 nt, Artificial Sequence
  Synthetic oligonucleotide
uauaaggugggaguuguga

SEQ ID NO: 489 - RNA, 19 nt, Artificial Sequence
  Synthetic oligonucleotide
ucacaacucccaccuuaua

SEQ ID NO: 490 - RNA, 19 nt, Artificial Sequence
  Synthetic oligonucleotide
uaaggugggaguugugaaa

SEQ ID NO: 491 - RNA, 19 nt, Artificial Sequence
  Synthetic oligonucleotide
uuucacaacucccaccuua

SEQ ID NO: 492 - RNA, 19 nt, Artificial Sequence
  Synthetic oligonucleotide
aaggugggaguugugaaga

SEQ ID NO: 493 - RNA, 19 nt, Artificial Sequence
  Synthetic oligonucleotide
ucuucacaacucccaccuu

SEQ ID NO: 494 - RNA, 19 nt, Artificial Sequence
  Synthetic oligonucleotide
gugggaguugugaagcaaa

SEQ ID NO: 495 - RNA, 19 nt, Artificial Sequence
  Synthetic oligonucleotide
uuugcuucacaacucccac

SEQ ID NO: 496 - RNA, 19 nt, Artificial Sequence
  Synthetic oligonucleotide
gggaguugugaagcaaaca

SEQ ID NO: 497 - RNA, 19 nt, Artificial Sequence
  Synthetic oligonucleotide
uguuugcuucacaacuccc

SEQ ID NO: 498 - RNA, 19 nt, Artificial Sequence
  Synthetic oligonucleotide
gaguugugaagcaaacuga

SEQ ID NO: 499 - RNA, 19 nt, Artificial Sequence
  Synthetic oligonucleotide
ucaguuugcuucacaacuc

SEQ ID NO: 500 - RNA, 19 nt, Artificial Sequence
  Synthetic oligonucleotide
aguugugaagcaaacugaa

SEQ ID NO: 501 - RNA, 19 nt, Artificial Sequence
  Synthetic oligonucleotide
uucaguuugcuucacaacu

SEQ ID NO: 502 - RNA, 19 nt, Artificial Sequence
  Synthetic oligonucleotide
guugugaagcaaacugaaa

SEQ ID NO: 503 - RNA, 19 nt, Artificial Sequence
  Synthetic oligonucleotide
uuucaguuugcuucacaac

SEQ ID NO: 504 - RNA, 19 nt, Artificial Sequence
  Synthetic oligonucleotide
ugugaagcaaacugaaaca

SEQ ID NO: 505 - RNA, 19 nt, Artificial Sequence
  Synthetic oligonucleotide
uguuucaguuugcuucaca

SEQ ID NO: 506 - RNA, 19 nt, Artificial Sequence
  Synthetic oligonucleotide
gaagcaaacugaaacugca

SEQ ID NO: 507 - RNA, 19 nt, Artificial Sequence
  Synthetic oligonucleotide
ugcaguuucaguuugcuuc

SEQ ID NO: 508 - RNA, 19 nt, Artificial Sequence
  Synthetic oligonucleotide
aacugaaacugcagcauua

SEQ ID NO: 509 - RNA, 19 nt, Artificial Sequence
  Synthetic oligonucleotide
uaaugcugcaguuucaguu

SEQ ID NO: 510 - RNA, 19 nt, Artificial Sequence
  Synthetic oligonucleotide
acugaaacugcagcauuaa

SEQ ID NO: 511 - RNA, 19 nt, Artificial Sequence
  Synthetic oligonucleotide
uuaaugcugcaguuucagu

SEQ ID NO: 512 - RNA, 19 nt, Artificial Sequence
  Synthetic oligonucleotide
cugaaacugcagcauuaaa

SEQ ID NO: 513 - RNA, 19 nt, Artificial Sequence
  Synthetic oligonucleotide
uuuaaugcugcaguuucag

SEQ ID NO: 514 - RNA, 19 nt, Artificial Sequence
  Synthetic oligonucleotide
ugaaacugcagcauuaaaa

SEQ ID NO: 515 - RNA, 19 nt, Artificial Sequence
  Synthetic oligonucleotide
uuuuaaugcugcaguuuca

SEQ ID NO: 516 - RNA, 19 nt, Artificial Sequence
  Synthetic oligonucleotide
aacugcagcauuaaaggca

SEQ ID NO: 517 - RNA, 19 nt, Artificial Sequence
  Synthetic oligonucleotide
ugccuuuaaugcugcaguu

SEQ ID NO: 518 - RNA, 19 nt, Artificial Sequence
  Synthetic oligonucleotide
cugcagcauuaaaggccaa

SEQ ID NO: 519 - RNA, 19 nt, Artificial Sequence
  Synthetic oligonucleotide
uuggccuuuaaugcugcag

SEQ ID NO: 520 - RNA, 19 nt, Artificial Sequence
  Synthetic oligonucleotide
gcauuaaaggccauuggaa

SEQ ID NO: 521 - RNA, 19 nt, Artificial Sequence
  Synthetic oligonucleotide
uuccaauggccuuuaaugc

SEQ ID NO: 522 - RNA, 19 nt, Artificial Sequence
  Synthetic oligonucleotide
auuaaaggccauuggagaa

SEQ ID NO: 523 - RNA, 19 nt, Artificial Sequence
  Synthetic oligonucleotide
uucuccaauggccuuuaau

SEQ ID NO: 524 - RNA, 19 nt, Artificial Sequence
  Synthetic oligonucleotide
uuaaaggccauuggagaca

SEQ ID NO: 525 - RNA, 19 nt, Artificial Sequence
  Synthetic oligonucleotide
ugucuccaauggccuuuaa

SEQ ID NO: 526 - RNA, 19 nt, Artificial Sequence
  Synthetic oligonucleotide
uaaaggccauuggagacaa

SEQ ID NO: 527 - RNA, 19 nt, Artificial Sequence
  Synthetic oligonucleotide
uugucuccaauggccuuua

SEQ ID NO: 528 - RNA, 19 nt, Artificial Sequence
  Synthetic oligonucleotide
aaaggccauuggagacaaa

SEQ ID NO: 529 - RNA, 19 nt, Artificial Sequence
  Synthetic oligonucleotide
uuugucuccaauggccuuu

SEQ ID NO: 530 - RNA, 19 nt, Artificial Sequence
  Synthetic oligonucleotide
aaggccauuggagacaaca

SEQ ID NO: 531 - RNA, 19 nt, Artificial Sequence
  Synthetic oligonucleotide
uguugucuccaauggccuu

SEQ ID NO: 532 - RNA, 19 nt, Artificial Sequence
  Synthetic oligonucleotide
ggccauuggagacaacaga

SEQ ID NO: 533 - RNA, 19 nt, Artificial Sequence
  Synthetic oligonucleotide
ucuguugucuccaauggcc

SEQ ID NO: 534 - RNA, 19 nt, Artificial Sequence
  Synthetic oligonucleotide
gccauuggagacaacagaa

SEQ ID NO: 535 - RNA, 19 nt, Artificial Sequence
  Synthetic oligonucleotide
uucuguugucuccaauggc

SEQ ID NO: 536 - RNA, 19 nt, Artificial Sequence
  Synthetic oligonucleotide
ccauuggagacaacagaaa

SEQ ID NO: 537 - RNA, 19 nt, Artificial Sequence
  Synthetic oligonucleotide
uuucuguugucuccaaugg

SEQ ID NO: 538 - RNA, 19 nt, Artificial Sequence
  Synthetic oligonucleotide
cauuggagacaacagaaga

SEQ ID NO: 539 - RNA, 19 nt, Artificial Sequence
  Synthetic oligonucleotide
ucuucuguugucuccaaug

SEQ ID NO: 540 - RNA, 19 nt, Artificial Sequence
  Synthetic oligonucleotide
auuggagacaacagaagua

SEQ ID NO: 541 - RNA, 19 nt, Artificial Sequence
  Synthetic oligonucleotide
uacuucuguugucuccaau

SEQ ID NO: 542 - RNA, 19 nt, Artificial Sequence
  Synthetic oligonucleotide
uuggagacaacagaaguua

SEQ ID NO: 543 - RNA, 19 nt, Artificial Sequence
  Synthetic oligonucleotide
uaacuucuguugucuccaa

SEQ ID NO: 544 - RNA, 19 nt, Artificial Sequence
  Synthetic oligonucleotide
uggagacaacagaaguuca

SEQ ID NO: 545 - RNA, 19 nt, Artificial Sequence
  Synthetic oligonucleotide
ugaacuucuguugucucca

SEQ ID NO: 546 - RNA, 19 nt, Artificial Sequence
  Synthetic oligonucleotide
gagacaacagaaguucaca

SEQ ID NO: 547 - RNA, 19 nt, Artificial Sequence
  Synthetic oligonucleotide
ugugaacuucuguugucuc

SEQ ID NO: 548 - RNA, 19 nt, Artificial Sequence
  Synthetic oligonucleotide
acaacagaaguucacucua

SEQ ID NO: 549 - RNA, 19 nt, Artificial Sequence
  Synthetic oligonucleotide
uagagugaacuucuguugu

SEQ ID NO: 550 - RNA, 19 nt, Artificial Sequence
  Synthetic oligonucleotide
caacagaaguucacucuua

SEQ ID NO: 551 - RNA, 19 nt, Artificial Sequence
  Synthetic oligonucleotide
uaagagugaacuucuguug

SEQ ID NO: 552 - RNA, 19 nt, Artificial Sequence
  Synthetic oligonucleotide
acagaaguucacucuuuua

SEQ ID NO: 553 - RNA, 19 nt, Artificial Sequence
  Synthetic oligonucleotide
uaaaagagugaacuucugu

SEQ ID NO: 554 - RNA, 19 nt, Artificial Sequence
  Synthetic oligonucleotide
cagaaguucacucuuuuca

SEQ ID NO: 555 - RNA, 19 nt, Artificial Sequence
  Synthetic oligonucleotide
ugaaaagagugaacuucug

SEQ ID NO: 556 - RNA, 19 nt, Artificial Sequence
  Synthetic oligonucleotide
gaaguucacucuuuuccca

SEQ ID NO: 557 - RNA, 19 nt, Artificial Sequence
  Synthetic oligonucleotide
ugggaaaagagugaacuuc

SEQ ID NO: 558 - RNA, 19 nt, Artificial Sequence
  Synthetic oligonucleotide
ucuuuucccggaaauugaa

SEQ ID NO: 559 - RNA, 19 nt, Artificial Sequence
  Synthetic oligonucleotide
uucaauuuccgggaaaaga

SEQ ID NO: 560 - RNA, 19 nt, Artificial Sequence
  Synthetic oligonucleotide
cuuuucccggaaauugaca

SEQ ID NO: 561 - RNA, 19 nt, Artificial Sequence
  Synthetic oligonucleotide
ugucaauuuccgggaaaag

SEQ ID NO: 562 - RNA, 19 nt, Artificial Sequence
  Synthetic oligonucleotide
uuuucccggaaauugacua

SEQ ID NO: 563 - RNA, 19 nt, Artificial Sequence
  Synthetic oligonucleotide
uagucaauuuccgggaaaa

SEQ ID NO: 564 - RNA, 19 nt, Artificial Sequence
  Synthetic oligonucleotide
uucccggaaauugacugca

SEQ ID NO: 565 - RNA, 19 nt, Artificial Sequence
  Synthetic oligonucleotide
ugcagucaauuuccgggaa

SEQ ID NO: 566 - RNA, 19 nt, Artificial Sequence
  Synthetic oligonucleotide
ggaaauugacugcccuuua

SEQ ID NO: 567 - RNA, 19 nt, Artificial Sequence
  Synthetic oligonucleotide
uaaagggcagucaauuucc

SEQ ID NO: 568 - RNA, 19 nt, Artificial Sequence
  Synthetic oligonucleotide
gaaauugacugcccuuuaa

SEQ ID NO: 569 - RNA, 19 nt, Artificial Sequence
  Synthetic oligonucleotide
uuaaagggcagucaauuuc

SEQ ID NO: 570 - RNA, 19 nt, Artificial Sequence
  Synthetic oligonucleotide
aaauugacugcccuuuaua

SEQ ID NO: 571 - RNA, 19 nt, Artificial Sequence
  Synthetic oligonucleotide
uauaaagggcagucaauuu

SEQ ID NO: 572 - RNA, 19 nt, Artificial Sequence
  Synthetic oligonucleotide
uugacugcccuuuauacaa

SEQ ID NO: 573 - RNA, 19 nt, Artificial Sequence
  Synthetic oligonucleotide
uuguauaaagggcagucaa

SEQ ID NO: 574 - RNA, 19 nt, Artificial Sequence
  Synthetic oligonucleotide
cugcccuuuauacaaaaua

SEQ ID NO: 575 - RNA, 19 nt, Artificial Sequence
  Synthetic oligonucleotide
uauuuuguauaaagggcag

SEQ ID NO: 576 - RNA, 19 nt, Artificial Sequence
  Synthetic oligonucleotide
ugcccuuuauacaaaauca

SEQ ID NO: 577 - RNA, 19 nt, Artificial Sequence
  Synthetic oligonucleotide
ugauuuuguauaaagggca

SEQ ID NO: 578 - RNA, 19 nt, Artificial Sequence
  Synthetic oligonucleotide
gcccuuuauacaaaaucua

SEQ ID NO: 579 - RNA, 19 nt, Artificial Sequence
  Synthetic oligonucleotide
uagauuuuguauaaagggc

SEQ ID NO: 580 - RNA, 19 nt, Artificial Sequence
  Synthetic oligonucleotide
cccuuuauacaaaaucuaa

SEQ ID NO: 581 - RNA, 19 nt, Artificial Sequence
  Synthetic oligonucleotide
uuagauuuuguauaaaggg

SEQ ID NO: 582 - RNA, 19 nt, Artificial Sequence
  Synthetic oligonucleotide
ccuuuauacaaaaucuaca

SEQ ID NO: 583 - RNA, 19 nt, Artificial Sequence
  Synthetic oligonucleotide
uguagauuuuguauaaagg

SEQ ID NO: 584 - RNA, 19 nt, Artificial Sequence
  Synthetic oligonucleotide
uuauacaaaaucuacacua

SEQ ID NO: 585 - RNA, 19 nt, Artificial Sequence
  Synthetic oligonucleotide
uaguguagauuuuguauaa

SEQ ID NO: 586 - RNA, 19 nt, Artificial Sequence
  Synthetic oligonucleotide
uauacaaaaucuacacuua

SEQ ID NO: 587 - RNA, 19 nt, Artificial Sequence
  Synthetic oligonucleotide
uaaguguagauuuuguaua

SEQ ID NO: 588 - RNA, 19 nt, Artificial Sequence
  Synthetic oligonucleotide
auacaaaaucuacacuuaa

SEQ ID NO: 589 - RNA, 19 nt, Artificial Sequence
  Synthetic oligonucleotide
uuaaguguagauuuuguau

SEQ ID NO: 590 - RNA, 19 nt, Artificial Sequence
  Synthetic oligonucleotide
caaaaucuacacuuauuga

SEQ ID NO: 591 - RNA, 19 nt, Artificial Sequence
  Synthetic oligonucleotide
ucaauaaguguagauuuug

SEQ ID NO: 592 - RNA, 19 nt, Artificial Sequence
  Synthetic oligonucleotide
aaaaucuacacuuauugga

SEQ ID NO: 593 - RNA, 19 nt, Artificial Sequence
  Synthetic oligonucleotide
uccaauaaguguagauuuu

SEQ ID NO: 594 - RNA, 19 nt, Artificial Sequence
  Synthetic oligonucleotide
aaaucuacacuuauuggaa

SEQ ID NO: 595 - RNA, 19 nt, Artificial Sequence
  Synthetic oligonucleotide
uuccaauaaguguagauuu

SEQ ID NO: 596 - RNA, 19 nt, Artificial Sequence
  Synthetic oligonucleotide
aucuacacuuauuggagaa

SEQ ID NO: 597 - RNA, 19 nt, Artificial Sequence
  Synthetic oligonucleotide
uucuccaauaaguguagau

SEQ ID NO: 598 - RNA, 19 nt, Artificial Sequence
  Synthetic oligonucleotide
ucuacacuuauuggagaaa

SEQ ID NO: 599 - RNA, 19 nt, Artificial Sequence
  Synthetic oligonucleotide
uuucuccaauaaguguaga

SEQ ID NO: 600 - RNA, 19 nt, Artificial Sequence
  Synthetic oligonucleotide
cacuuauuggagaagauga

SEQ ID NO: 601 - RNA, 19 nt, Artificial Sequence
  Synthetic oligonucleotide
ucaucuucuccaauaagug

SEQ ID NO: 602 - RNA, 19 nt, Artificial Sequence
  Synthetic oligonucleotide
acuuauuggagaagaugua

SEQ ID NO: 603 - RNA, 19 nt, Artificial Sequence
  Synthetic oligonucleotide
uacaucuucuccaauaagu

SEQ ID NO: 604 - RNA, 19 nt, Artificial Sequence
  Synthetic oligonucleotide
cuuauuggagaagauguga

SEQ ID NO: 605 - RNA, 19 nt, Artificial Sequence
  Synthetic oligonucleotide
ucacaucuucuccaauaag

SEQ ID NO: 606 - RNA, 19 nt, Artificial Sequence
  Synthetic oligonucleotide
uuauuggagaagaugugaa

SEQ ID NO: 607 - RNA, 19 nt, Artificial Sequence
  Synthetic oligonucleotide
uucacaucuucuccaauaa

SEQ ID NO: 608 - RNA, 19 nt, Artificial Sequence
  Synthetic oligonucleotide
agaagaugugaauccccua

SEQ ID NO: 609 - RNA, 19 nt, Artificial Sequence
  Synthetic oligonucleotide
uaggggauucacaucuucu

SEQ ID NO: 610 - RNA, 19 nt, Artificial Sequence
  Synthetic oligonucleotide
gaagaugugaauccccuaa

SEQ ID NO: 611 - RNA, 19 nt, Artificial Sequence
  Synthetic oligonucleotide
uuaggggauucacaucuuc

SEQ ID NO: 612 - RNA, 19 nt, Artificial Sequence
  Synthetic oligonucleotide
agaugugaauccccuaaua

SEQ ID NO: 613 - RNA, 19 nt, Artificial Sequence
  Synthetic oligonucleotide
uauuaggggauucacaucu

SEQ ID NO: 614 - RNA, 19 nt, Artificial Sequence
  Synthetic oligonucleotide
gaugugaauccccuaauca

SEQ ID NO: 615 - RNA, 19 nt, Artificial Sequence
  Synthetic oligonucleotide
ugauuaggggauucacauc

SEQ ID NO: 616 - RNA, 19 nt, Artificial Sequence
  Synthetic oligonucleotide
ugugaauccccuaaucaaa

SEQ ID NO: 617 - RNA, 19 nt, Artificial Sequence
  Synthetic oligonucleotide
uuugauuaggggauucaca

SEQ ID NO: 618 - RNA, 19 nt, Artificial Sequence
  Synthetic oligonucleotide
gugaauccccuaaucaaga

SEQ ID NO: 619 - RNA, 19 nt, Artificial Sequence
  Synthetic oligonucleotide
ucuugauuaggggauucac

SEQ ID NO: 620 - RNA, 19 nt, Artificial Sequence
  Synthetic oligonucleotide
ugaauccccuaaucaagca

SEQ ID NO: 621 - RNA, 19 nt, Artificial Sequence
  Synthetic oligonucleotide
ugcuugauuaggggauuca

SEQ ID NO: 622 - RNA, 19 nt, Artificial Sequence
  Synthetic oligonucleotide
gaauccccuaaucaagcua

SEQ ID NO: 623 - RNA, 19 nt, Artificial Sequence
  Synthetic oligonucleotide
uagcuugauuaggggauuc

SEQ ID NO: 624 - RNA, 19 nt, Artificial Sequence
  Synthetic oligonucleotide
cuaaucaagcuggaugaua

SEQ ID NO: 625 - RNA, 19 nt, Artificial Sequence
  Synthetic oligonucleotide
uaucauccagcuugauuag

SEQ ID NO: 626 - RNA, 19 nt, Artificial Sequence
  Synthetic oligonucleotide
uaaucaagcuggaugauga

SEQ ID NO: 627 - RNA, 19 nt, Artificial Sequence
  Synthetic oligonucleotide
ucaucauccagcuugauua

SEQ ID NO: 628 - RNA, 19 nt, Artificial Sequence
  Synthetic oligonucleotide
aaucaagcuggaugaugca

SEQ ID NO: 629 - RNA, 19 nt, Artificial Sequence
  Synthetic oligonucleotide
ugcaucauccagcuugauu

SEQ ID NO: 630 - RNA, 19 nt, Artificial Sequence
  Synthetic oligonucleotide
caagcuggaugaugcugua

SEQ ID NO: 631 - RNA, 19 nt, Artificial Sequence
  Synthetic oligonucleotide
uacagcaucauccagcuug

SEQ ID NO: 632 - RNA, 19 nt, Artificial Sequence
  Synthetic oligonucleotide
agcuggaugaugcuguaaa

SEQ ID NO: 633 - RNA, 19 nt, Artificial Sequence
  Synthetic oligonucleotide
uuuacagcaucauccagcu

SEQ ID NO: 634 - RNA, 19 nt, Artificial Sequence
  Synthetic oligonucleotide
uggaugaugcuguaaauga

SEQ ID NO: 635 - RNA, 19 nt, Artificial Sequence
  Synthetic oligonucleotide
ucauuuacagcaucaucca

SEQ ID NO: 636 - RNA, 19 nt, Artificial Sequence
  Synthetic oligonucleotide
gaugaugcuguaaauguua

SEQ ID NO: 637 - RNA, 19 nt, Artificial Sequence
  Synthetic oligonucleotide
uaacauuuacagcaucauc

SEQ ID NO: 638 - RNA, 19 nt, Artificial Sequence
  Synthetic oligonucleotide
uguaaauguugaugagaua

SEQ ID NO: 639 - RNA, 19 nt, Artificial Sequence
  Synthetic oligonucleotide
uaucucaucaacauuuaca

SEQ ID NO: 640 - RNA, 19 nt, Artificial Sequence
  Synthetic oligonucleotide
guaaauguugaugagauaa

SEQ ID NO: 641 - RNA, 19 nt, Artificial Sequence
  Synthetic oligonucleotide
uuaucucaucaacauuuac

SEQ ID NO: 642 - RNA, 19 nt, Artificial Sequence
  Synthetic oligonucleotide
uaaauguugaugagauaaa

SEQ ID NO: 643 - RNA, 19 nt, Artificial Sequence
  Synthetic oligonucleotide
uuuaucucaucaacauuua

SEQ ID NO: 644 - RNA, 19 nt, Artificial Sequence
  Synthetic oligonucleotide
auguugaugagauaaugaa

SEQ ID NO: 645 - RNA, 19 nt, Artificial Sequence
  Synthetic oligonucleotide
uucauuaucucaucaacau

SEQ ID NO: 646 - RNA, 19 nt, Artificial Sequence
  Synthetic oligonucleotide
uguugaugagauaaugaca

SEQ ID NO: 647 - RNA, 19 nt, Artificial Sequence
  Synthetic oligonucleotide
ugucauuaucucaucaaca

SEQ ID NO: 648 - RNA, 19 nt, Artificial Sequence
  Synthetic oligonucleotide
guugaugagauaaugacua

SEQ ID NO: 649 - RNA, 19 nt, Artificial Sequence
  Synthetic oligonucleotide
uagucauuaucucaucaac

SEQ ID NO: 650 - RNA, 19 nt, Artificial Sequence
  Synthetic oligonucleotide
uugaugagauaaugacuga

SEQ ID NO: 651 - RNA, 19 nt, Artificial Sequence
  Synthetic oligonucleotide
ucagucauuaucucaucaa

SEQ ID NO: 652 - RNA, 19 nt, Artificial Sequence
  Synthetic oligonucleotide
ugaugagauaaugacugaa

SEQ ID NO: 653 - RNA, 19 nt, Artificial Sequence
  Synthetic oligonucleotide
uucagucauuaucucauca

SEQ ID NO: 654 - RNA, 19 nt, Artificial Sequence
  Synthetic oligonucleotide
gaugagauaaugacugaua

SEQ ID NO: 655 - RNA, 19 nt, Artificial Sequence
  Synthetic oligonucleotide
uaucagucauuaucucauc

SEQ ID NO: 656 - RNA, 19 nt, Artificial Sequence
  Synthetic oligonucleotide
agauaaugacugauacuua

SEQ ID NO: 657 - RNA, 19 nt, Artificial Sequence
  Synthetic oligonucleotide
uaaguaucagucauuaucu

SEQ ID NO: 658 - RNA, 19 nt, Artificial Sequence
  Synthetic oligonucleotide
gauaaugacugauacuuca

SEQ ID NO: 659 - RNA, 19 nt, Artificial Sequence
  Synthetic oligonucleotide
ugaaguaucagucauuauc

SEQ ID NO: 660 - RNA, 19 nt, Artificial Sequence
  Synthetic oligonucleotide
auaaugacugauacuucua

SEQ ID NO: 661 - RNA, 19 nt, Artificial Sequence
  Synthetic oligonucleotide
uagaaguaucagucauuau

SEQ ID NO: 662 - RNA, 19 nt, Artificial Sequence
  Synthetic oligonucleotide
aaugacugauacuucuaca

SEQ ID NO: 663 - RNA, 19 nt, Artificial Sequence
  Synthetic oligonucleotide
uguagaaguaucagucauu

SEQ ID NO: 664 - RNA, 19 nt, Artificial Sequence
  Synthetic oligonucleotide
ugacugauacuucuaccaa

SEQ ID NO: 665 - RNA, 19 nt, Artificial Sequence
  Synthetic oligonucleotide
uugguagaaguaucaguca

SEQ ID NO: 666 - RNA, 19 nt, Artificial Sequence
  Synthetic oligonucleotide
gacugauacuucuaccaga

SEQ ID NO: 667 - RNA, 19 nt, Artificial Sequence
  Synthetic oligonucleotide
ucugguagaaguaucaguc

SEQ ID NO: 668 - RNA, 19 nt, Artificial Sequence
  Synthetic oligonucleotide
ugauacuucuaccagcuaa

SEQ ID NO: 669 - RNA, 19 nt, Artificial Sequence
  Synthetic oligonucleotide
uuagcugguagaaguauca

SEQ ID NO: 670 - RNA, 19 nt, Artificial Sequence
  Synthetic oligonucleotide
gauacuucuaccagcuaua

SEQ ID NO: 671 - RNA, 19 nt, Artificial Sequence
  Synthetic oligonucleotide
uauagcugguagaaguauc

SEQ ID NO: 672 - RNA, 19 nt, Artificial Sequence
  Synthetic oligonucleotide
acuucuaccagcuaucuua

SEQ ID NO: 673 - RNA, 19 nt, Artificial Sequence
  Synthetic oligonucleotide
uaagauagcugguagaagu

SEQ ID NO: 674 - RNA, 19 nt, Artificial Sequence
  Synthetic oligonucleotide
uucuaccagcuaucuucua

SEQ ID NO: 675 - RNA, 19 nt, Artificial Sequence
  Synthetic oligonucleotide
uagaagauagcugguagaa

SEQ ID NO: 676 - RNA, 19 nt, Artificial Sequence
  Synthetic oligonucleotide
ucuaccagcuaucuucuga

SEQ ID NO: 677 - RNA, 19 nt, Artificial Sequence
  Synthetic oligonucleotide
ucagaagauagcugguaga

SEQ ID NO: 678 - RNA, 19 nt, Artificial Sequence
  Synthetic oligonucleotide
cuaccagcuaucuucugua

SEQ ID NO: 679 - RNA, 19 nt, Artificial Sequence
  Synthetic oligonucleotide
uacagaagauagcugguag

SEQ ID NO: 680 - RNA, 19 nt, Artificial Sequence
  Synthetic oligonucleotide
uaccagcuaucuucuguga

SEQ ID NO: 681 - RNA, 19 nt, Artificial Sequence
  Synthetic oligonucleotide
ucacagaagauagcuggua

SEQ ID NO: 682 - RNA, 19 nt, Artificial Sequence
  Synthetic oligonucleotide
accagcuaucuucugugca

SEQ ID NO: 683 - RNA, 19 nt, Artificial Sequence
  Synthetic oligonucleotide
ugcacagaagauagcuggu

SEQ ID NO: 684 - RNA, 19 nt, Artificial Sequence
  Synthetic oligonucleotide
ccagcuaucuucugugcaa

SEQ ID NO: 685 - RNA, 19 nt, Artificial Sequence
  Synthetic oligonucleotide
uugcacagaagauagcugg

SEQ ID NO: 686 - RNA, 19 nt, Artificial Sequence
  Synthetic oligonucleotide
gcuaucuucugugcaucua

SEQ ID NO: 687 - RNA, 19 nt, Artificial Sequence
  Synthetic oligonucleotide
uagaugcacagaagauagc

SEQ ID NO: 688 - RNA, 19 nt, Artificial Sequence
  Synthetic oligonucleotide
cuaucuucugugcaucuca

SEQ ID NO: 689 - RNA, 19 nt, Artificial Sequence
  Synthetic oligonucleotide
ugagaugcacagaagauag

SEQ ID NO: 690 - RNA, 19 nt, Artificial Sequence
  Synthetic oligonucleotide
aucucugaaaauaaggaaa

SEQ ID NO: 691 - RNA, 19 nt, Artificial Sequence
  Synthetic oligonucleotide
uuuccuuauuuucagagau

SEQ ID NO: 692 - RNA, 19 nt, Artificial Sequence
  Synthetic oligonucleotide
gaaaauaaggaaaauguua

SEQ ID NO: 693 - RNA, 19 nt, Artificial Sequence
  Synthetic oligonucleotide
uaacauuuuccuuauuuuc

SEQ ID NO: 694 - RNA, 19 nt, Artificial Sequence
  Synthetic oligonucleotide
aaaauaaggaaaauguuaa

SEQ ID NO: 695 - RNA, 19 nt, Artificial Sequence
  Synthetic oligonucleotide
uuaacauuuuccuuauuuu

SEQ ID NO: 696 - RNA, 19 nt, Artificial Sequence
  Synthetic oligonucleotide
aggaaaauguuagggacaa

SEQ ID NO: 697 - RNA, 19 nt, Artificial Sequence
  Synthetic oligonucleotide
uugucccuaacauuuuccu

SEQ ID NO: 698 - RNA, 19 nt, Artificial Sequence
  Synthetic oligonucleotide
ggaaaauguuagggacaaa

SEQ ID NO: 699 - RNA, 19 nt, Artificial Sequence
  Synthetic oligonucleotide
uuugucccuaacauuuucc

SEQ ID NO: 700 - RNA, 19 nt, Artificial Sequence
  Synthetic oligonucleotide
uuuuauuggcauuguggga

SEQ ID NO: 701 - RNA, 19 nt, Artificial Sequence
  Synthetic oligonucleotide
ucccacaaugccaauaaaa

SEQ ID NO: 702 - RNA, 19 nt, Artificial Sequence
  Synthetic oligonucleotide
ugccacaggcgagguugua

SEQ ID NO: 703 - RNA, 19 nt, Artificial Sequence
  Synthetic oligonucleotide
uacaaccucgccuguggca

SEQ ID NO: 704 - RNA, 19 nt, Artificial Sequence
  Synthetic oligonucleotide
ccacaggcgagguugugua

SEQ ID NO: 705 - RNA, 19 nt, Artificial Sequence
  Synthetic oligonucleotide
uacacaaccucgccugugg

SEQ ID NO: 706 - RNA, 19 nt, Artificial Sequence
  Synthetic oligonucleotide
cacaggcgagguuguguua

SEQ ID NO: 707 - RNA, 19 nt, Artificial Sequence
  Synthetic oligonucleotide
uaacacaaccucgccugug

SEQ ID NO: 708 - RNA, 19 nt, Artificial Sequence
  Synthetic oligonucleotide
caggcgagguuguguuuga

SEQ ID NO: 709 - RNA, 19 nt, Artificial Sequence
  Synthetic oligonucleotide
ucaaacacaaccucgccug

SEQ ID NO: 710 - RNA, 19 nt, Artificial Sequence
  Synthetic oligonucleotide
aggcgagguuguguuugaa

SEQ ID NO: 711 - RNA, 19 nt, Artificial Sequence
  Synthetic oligonucleotide
uucaaacacaaccucgccu

SEQ ID NO: 712 - RNA, 19 nt, Artificial Sequence
  Synthetic oligonucleotide
ggcgagguuguguuugaua

SEQ ID NO: 713 - RNA, 19 nt, Artificial Sequence
  Synthetic oligonucleotide
uaucaaacacaaccucgcc

SEQ ID NO: 714 - RNA, 19 nt, Artificial Sequence
  Synthetic oligonucleotide
gcgagguuguguuugauaa

SEQ ID NO: 715 - RNA, 19 nt, Artificial Sequence
  Synthetic oligonucleotide
uuaucaaacacaaccucgc

SEQ ID NO: 716 - RNA, 19 nt, Artificial Sequence
  Synthetic oligonucleotide
cgagguuguguuugauaga

SEQ ID NO: 717 - RNA, 19 nt, Artificial Sequence
  Synthetic oligonucleotide
ucuaucaaacacaaccucg

SEQ ID NO: 718 - RNA, 19 nt, Artificial Sequence
  Synthetic oligonucleotide
gagguuguguuugauagua

SEQ ID NO: 719 - RNA, 19 nt, Artificial Sequence
  Synthetic oligonucleotide
uacuaucaaacacaaccuc

SEQ ID NO: 720 - RNA, 19 nt, Artificial Sequence
  Synthetic oligonucleotide
agguuguguuugauaguua

SEQ ID NO: 721 - RNA, 19 nt, Artificial Sequence
  Synthetic oligonucleotide
uaacuaucaaacacaaccu

SEQ ID NO: 722 - RNA, 19 nt, Artificial Sequence
  Synthetic oligonucleotide
gguuguguuugauaguuua

SEQ ID NO: 723 - RNA, 19 nt, Artificial Sequence
  Synthetic oligonucleotide
uaaacuaucaaacacaacc

SEQ ID NO: 724 - RNA, 19 nt, Artificial Sequence
  Synthetic oligonucleotide
guuguguuugauaguuuca

SEQ ID NO: 725 - RNA, 19 nt, Artificial Sequence
  Synthetic oligonucleotide
ugaaacuaucaaacacaac

SEQ ID NO: 726 - RNA, 19 nt, Artificial Sequence
  Synthetic oligonucleotide
guuugauaguuuccaggaa

SEQ ID NO: 727 - RNA, 19 nt, Artificial Sequence
  Synthetic oligonucleotide
uuccuggaaacuaucaaac

SEQ ID NO: 728 - RNA, 19 nt, Artificial Sequence
  Synthetic oligonucleotide
caggacucugcuucucgua

SEQ ID NO: 729 - RNA, 19 nt, Artificial Sequence
  Synthetic oligonucleotide
uacgagaagcagaguccug

SEQ ID NO: 730 - RNA, 19 nt, Artificial Sequence
  Synthetic oligonucleotide
aggacucugcuucucguua

SEQ ID NO: 731 - RNA, 19 nt, Artificial Sequence
  Synthetic oligonucleotide
uaacgagaagcagaguccu

SEQ ID NO: 732 - RNA, 19 nt, Artificial Sequence
  Synthetic oligonucleotide
ggacucugcuucucguuca

SEQ ID NO: 733 - RNA, 19 nt, Artificial Sequence
  Synthetic oligonucleotide
ugaacgagaagcagagucc

SEQ ID NO: 734 - RNA, 19 nt, Artificial Sequence
  Synthetic oligonucleotide
gacucugcuucucguucaa

SEQ ID NO: 735 - RNA, 19 nt, Artificial Sequence
  Synthetic oligonucleotide
uugaacgagaagcagaguc

SEQ ID NO: 736 - RNA, 19 nt, Artificial Sequence
  Synthetic oligonucleotide
acucugcuucucguucaga

SEQ ID NO: 737 - RNA, 19 nt, Artificial Sequence
  Synthetic oligonucleotide
ucugaacgagaagcagagu

SEQ ID NO: 738 - RNA, 19 nt, Artificial Sequence
  Synthetic oligonucleotide
gcuucucguucagagcuaa

SEQ ID NO: 739 - RNA, 19 nt, Artificial Sequence
  Synthetic oligonucleotide
uuagcucugaacgagaagc

SEQ ID NO: 740 - RNA, 19 nt, Artificial Sequence
  Synthetic oligonucleotide
cuucucguucagagcuaga

SEQ ID NO: 741 - RNA, 19 nt, Artificial Sequence
  Synthetic oligonucleotide
ucuagcucugaacgagaag

SEQ ID NO: 742 - RNA, 19 nt, Artificial Sequence
  Synthetic oligonucleotide
uucucguucagagcuagaa

SEQ ID NO: 743 - RNA, 19 nt, Artificial Sequence
  Synthetic oligonucleotide
uucuagcucugaacgagaa

SEQ ID NO: 744 - RNA, 19 nt, Artificial Sequence
  Synthetic oligonucleotide
ucucguucagagcuagaaa

SEQ ID NO: 745 - RNA, 19 nt, Artificial Sequence
  Synthetic oligonucleotide
uuucuagcucugaacgaga

SEQ ID NO: 746 - RNA, 19 nt, Artificial Sequence
  Synthetic oligonucleotide
ucguucagagcuagaaaca

SEQ ID NO: 747 - RNA, 19 nt, Artificial Sequence
  Synthetic oligonucleotide
uguuucuagcucugaacga

SEQ ID NO: 748 - RNA, 19 nt, Artificial Sequence
  Synthetic oligonucleotide
uagaaacccggaugucaaa

SEQ ID NO: 749 - RNA, 19 nt, Artificial Sequence
  Synthetic oligonucleotide
uuugacauccggguuucua

SEQ ID NO: 750 - RNA, 19 nt, Artificial Sequence
  Synthetic oligonucleotide
gaaacccggaugucaagca

SEQ ID NO: 751 - RNA, 19 nt, Artificial Sequence
  Synthetic oligonucleotide
ugcuugacauccggguuuc

SEQ ID NO: 752 - RNA, 19 nt, Artificial Sequence
  Synthetic oligonucleotide
aagccugcagccaguagaa

SEQ ID NO: 753 - RNA, 19 nt, Artificial Sequence
  Synthetic oligonucleotide
uucuacuggcugcaggcuu

SEQ ID NO: 754 - RNA, 19 nt, Artificial Sequence
  Synthetic oligonucleotide
cugcagccaguagagcuga

SEQ ID NO: 755 - RNA, 19 nt, Artificial Sequence
  Synthetic oligonucleotide
ucagcucuacuggcugcag

SEQ ID NO: 756 - RNA, 19 nt, Artificial Sequence
  Synthetic oligonucleotide
uccuucggccuuguccgaa

SEQ ID NO: 757 - RNA, 19 nt, Artificial Sequence
  Synthetic oligonucleotide
uucggacaaggccgaagga

SEQ ID NO: 758 - RNA, 19 nt, Artificial Sequence
  Synthetic oligonucleotide
cggccuuguccgagcaaaa

SEQ ID NO: 759 - RNA, 19 nt, Artificial Sequence
  Synthetic oligonucleotide
uuuugcucggacaaggccg

SEQ ID NO: 760 - RNA, 19 nt, Artificial Sequence
  Synthetic oligonucleotide
ccuuguccgagcaaacaga

SEQ ID NO: 761 - RNA, 19 nt, Artificial Sequence
  Synthetic oligonucleotide
ucuguuugcucggacaagg

SEQ ID NO: 762 - RNA, 19 nt, Artificial Sequence
  Synthetic oligonucleotide
cuuguccgagcaaacagaa

SEQ ID NO: 763 - RNA, 19 nt, Artificial Sequence
  Synthetic oligonucleotide
uucuguuugcucggacaag

SEQ ID NO: 764 - RNA, 19 nt, Artificial Sequence
  Synthetic oligonucleotide
uguccgagcaaacagagga

SEQ ID NO: 765 - RNA, 19 nt, Artificial Sequence
  Synthetic oligonucleotide
uccucuguuugcucggaca

SEQ ID NO: 766 - RNA, 19 nt, Artificial Sequence
  Synthetic oligonucleotide
aacagaggcgcucauccaa

SEQ ID NO: 767 - RNA, 19 nt, Artificial Sequence
  Synthetic oligonucleotide
uuggaugagcgccucuguu

SEQ ID NO: 768 - RNA, 19 nt, Artificial Sequence
  Synthetic oligonucleotide
acagaggcgcucauccaca

SEQ ID NO: 769 - RNA, 19 nt, Artificial Sequence
  Synthetic oligonucleotide
uguggaugagcgccucugu

SEQ ID NO: 770 - RNA, 19 nt, Artificial Sequence
  Synthetic oligonucleotide
cagaggcgcucauccacaa

SEQ ID NO: 771 - RNA, 19 nt, Artificial Sequence
  Synthetic oligonucleotide
uuguggaugagcgccucug

SEQ ID NO: 772 - RNA, 19 nt, Artificial Sequence
  Synthetic oligonucleotide
agaggcgcucauccacaga

SEQ ID NO: 773 - RNA, 19 nt, Artificial Sequence
  Synthetic oligonucleotide
ucuguggaugagcgccucu

SEQ ID NO: 774 - RNA, 19 nt, Artificial Sequence
  Synthetic oligonucleotide
gaggcgcucauccacagaa

SEQ ID NO: 775 - RNA, 19 nt, Artificial Sequence
  Synthetic oligonucleotide
uucuguggaugagcgccuc

SEQ ID NO: 776 - RNA, 19 nt, Artificial Sequence
  Synthetic oligonucleotide
cacagagccacaucuguua

SEQ ID NO: 777 - RNA, 19 nt, Artificial Sequence
  Synthetic oligonucleotide
uaacagauguggcucugug

SEQ ID NO: 778 - RNA, 19 nt, Artificial Sequence
  Synthetic oligonucleotide
agagccacaucuguuagua

SEQ ID NO: 779 - RNA, 19 nt, Artificial Sequence
  Synthetic oligonucleotide
uacuaacagauguggcucu

SEQ ID NO: 780 - RNA, 19 nt, Artificial Sequence
  Synthetic oligonucleotide
agccacaucuguuagugua

SEQ ID NO: 781 - RNA, 19 nt, Artificial Sequence
  Synthetic oligonucleotide
uacacuaacagauguggcu

SEQ ID NO: 782 - RNA, 19 nt, Artificial Sequence
  Synthetic oligonucleotide
gccacaucuguuaguguga

SEQ ID NO: 783 - RNA, 19 nt, Artificial Sequence
  Synthetic oligonucleotide
ucacacuaacagauguggc

SEQ ID NO: 784 - RNA, 19 nt, Artificial Sequence
  Synthetic oligonucleotide
ccacaucuguuagugugca

SEQ ID NO: 785 - RNA, 19 nt, Artificial Sequence
  Synthetic oligonucleotide
ugcacacuaacagaugugg

SEQ ID NO: 786 - RNA, 19 nt, Artificial Sequence
  Synthetic oligonucleotide
ucuguuagugugcaggaua

SEQ ID NO: 787 - RNA, 19 nt, Artificial Sequence
  Synthetic oligonucleotide
uauccugcacacuaacaga

SEQ ID NO: 788 - RNA, 19 nt, Artificial Sequence
  Synthetic oligonucleotide
guuagugugcaggaugaca

SEQ ID NO: 789 - RNA, 19 nt, Artificial Sequence
  Synthetic oligonucleotide
ugucauccugcacacuaac

SEQ ID NO: 790 - RNA, 19 nt, Artificial Sequence
  Synthetic oligonucleotide
uuagugugcaggaugacaa

SEQ ID NO: 791 - RNA, 19 nt, Artificial Sequence
  Synthetic oligonucleotide
uugucauccugcacacuaa

SEQ ID NO: 792 - RNA, 19 nt, Artificial Sequence
  Synthetic oligonucleotide
gugugcaggaugacagaaa

SEQ ID NO: 793 - RNA, 19 nt, Artificial Sequence
  Synthetic oligonucleotide
uuucugucauccugcacac

SEQ ID NO: 794 - RNA, 19 nt, Artificial Sequence
  Synthetic oligonucleotide
ugugcaggaugacagaaua

SEQ ID NO: 795 - RNA, 19 nt, Artificial Sequence
  Synthetic oligonucleotide
uauucugucauccugcaca

SEQ ID NO: 796 - RNA, 19 nt, Artificial Sequence
  Synthetic oligonucleotide
gugcaggaugacagaauua

SEQ ID NO: 797 - RNA, 19 nt, Artificial Sequence
  Synthetic oligonucleotide
uaauucugucauccugcac

SEQ ID NO: 798 - RNA, 19 nt, Artificial Sequence
  Synthetic oligonucleotide
aggaugacagaauucgaga

SEQ ID NO: 799 - RNA, 19 nt, Artificial Sequence
  Synthetic oligonucleotide
ucucgaauucugucauccu

SEQ ID NO: 800 - RNA, 19 nt, Artificial Sequence
  Synthetic oligonucleotide
acagaauucgagucgaaaa

SEQ ID NO: 801 - RNA, 19 nt, Artificial Sequence
  Synthetic oligonucleotide
uuuucgacucgaauucugu

SEQ ID NO: 802 - RNA, 19 nt, Artificial Sequence
  Synthetic oligonucleotide
cagaauucgagucgaaaga

SEQ ID NO: 803 - RNA, 19 nt, Artificial Sequence
  Synthetic oligonucleotide
ucuuucgacucgaauucug

SEQ ID NO: 804 - RNA, 19 nt, Artificial Sequence
  Synthetic oligonucleotide
agaauucgagucgaaagga

SEQ ID NO: 805 - RNA, 19 nt, Artificial Sequence
  Synthetic oligonucleotide
uccuuucgacucgaauucu

SEQ ID NO: 806 - RNA, 19 nt, Artificial Sequence
  Synthetic oligonucleotide
uucgagucgaaaggaugga

SEQ ID NO: 807 - RNA, 19 nt, Artificial Sequence
  Synthetic oligonucleotide
uccauccuuucgacucgaa

SEQ ID NO: 808 - RNA, 19 nt, Artificial Sequence
  Synthetic oligonucleotide
cgagucgaaaggauggaua

SEQ ID NO: 809 - RNA, 19 nt, Artificial Sequence
  Synthetic oligonucleotide
uauccauccuuucgacucg

SEQ ID NO: 810 - RNA, 19 nt, Artificial Sequence
  Synthetic oligonucleotide
gagucgaaaggauggauaa

SEQ ID NO: 811 - RNA, 19 nt, Artificial Sequence
  Synthetic oligonucleotide
uuauccauccuuucgacuc

SEQ ID NO: 812 - RNA, 19 nt, Artificial Sequence
  Synthetic oligonucleotide
agucgaaaggauggauaaa

SEQ ID NO: 813 - RNA, 19 nt, Artificial Sequence
  Synthetic oligonucleotide
uuuauccauccuuucgacu

SEQ ID NO: 814 - RNA, 19 nt, Artificial Sequence
  Synthetic oligonucleotide
gucgaaaggauggauaaca

SEQ ID NO: 815 - RNA, 19 nt, Artificial Sequence
  Synthetic oligonucleotide
uguuauccauccuuucgac

SEQ ID NO: 816 - RNA, 19 nt, Artificial Sequence
  Synthetic oligonucleotide
ucgaaaggauggauaacaa

SEQ ID NO: 817 - RNA, 19 nt, Artificial Sequence
  Synthetic oligonucleotide
uuguuauccauccuuucga

SEQ ID NO: 818 - RNA, 19 nt, Artificial Sequence
  Synthetic oligonucleotide
cgaaaggauggauaacaua

SEQ ID NO: 819 - RNA, 19 nt, Artificial Sequence
  Synthetic oligonucleotide
uauguuauccauccuuucg

SEQ ID NO: 820 - RNA, 19 nt, Artificial Sequence
  Synthetic oligonucleotide
gaaaggauggauaacauua

SEQ ID NO: 821 - RNA, 19 nt, Artificial Sequence
  Synthetic oligonucleotide
uaauguuauccauccuuuc

SEQ ID NO: 822 - RNA, 19 nt, Artificial Sequence
  Synthetic oligonucleotide
aaaggauggauaacauuua

SEQ ID NO: 823 - RNA, 19 nt, Artificial Sequence
  Synthetic oligonucleotide
uaaauguuauccauccuuu

SEQ ID NO: 824 - RNA, 19 nt, Artificial Sequence
  Synthetic oligonucleotide
aggauggauaacauuuaua

SEQ ID NO: 825 - RNA, 19 nt, Artificial Sequence
  Synthetic oligonucleotide
uauaaauguuauccauccu

SEQ ID NO: 826 - RNA, 19 nt, Artificial Sequence
  Synthetic oligonucleotide
ggauaacauuuauuuugaa

SEQ ID NO: 827 - RNA, 19 nt, Artificial Sequence
  Synthetic oligonucleotide
uucaaaauaaauguuaucc

SEQ ID NO: 828 - RNA, 19 nt, Artificial Sequence
  Synthetic oligonucleotide
gauaacauuuauuuugaaa

SEQ ID NO: 829 - RNA, 19 nt, Artificial Sequence
  Synthetic oligonucleotide
uuucaaaauaaauguuauc

SEQ ID NO: 830 - RNA, 19 nt, Artificial Sequence
  Synthetic oligonucleotide
auaacauuuauuuugaaua

SEQ ID NO: 831 - RNA, 19 nt, Artificial Sequence
  Synthetic oligonucleotide
uauucaaaauaaauguuau

SEQ ID NO: 832 - RNA, 19 nt, Artificial Sequence
  Synthetic oligonucleotide
ugaauacagccaugcuuua

SEQ ID NO: 833 - RNA, 19 nt, Artificial Sequence
  Synthetic oligonucleotide
uaaagcauggcuguauuca

SEQ ID NO: 834 - RNA, 19 nt, Artificial Sequence
  Synthetic oligonucleotide
caugcuuuccaggcaguua

SEQ ID NO: 835 - RNA, 19 nt, Artificial Sequence
  Synthetic oligonucleotide
uaacugccuggaaagcaug

SEQ ID NO: 836 - RNA, 19 nt, Artificial Sequence
  Synthetic oligonucleotide
augcuuuccaggcaguuaa

SEQ ID NO: 837 - RNA, 19 nt, Artificial Sequence
  Synthetic oligonucleotide
uuaacugccuggaaagcau

SEQ ID NO: 838 - RNA, 19 nt, Artificial Sequence
  Synthetic oligonucleotide
ugcuuuccaggcaguuaca

SEQ ID NO: 839 - RNA, 19 nt, Artificial Sequence
  Synthetic oligonucleotide
uguaacugccuggaaagca

SEQ ID NO: 840 - RNA, 19 nt, Artificial Sequence
  Synthetic oligonucleotide
gcuuuccaggcaguuacaa

SEQ ID NO: 841 - RNA, 19 nt, Artificial Sequence
  Synthetic oligonucleotide
uuguaacugccuggaaagc

SEQ ID NO: 842 - RNA, 19 nt, Artificial Sequence
  Synthetic oligonucleotide
uccaggcaguuacagagua

SEQ ID NO: 843 - RNA, 19 nt, Artificial Sequence
  Synthetic oligonucleotide
uacucuguaacugccugga

SEQ ID NO: 844 - RNA, 19 nt, Artificial Sequence
  Synthetic oligonucleotide
caggcaguuacagaguuua

SEQ ID NO: 845 - RNA, 19 nt, Artificial Sequence
  Synthetic oligonucleotide
uaaacucuguaacugccug

SEQ ID NO: 846 - RNA, 19 nt, Artificial Sequence
  Synthetic oligonucleotide
gcaguuacagaguuuuaua

SEQ ID NO: 847 - RNA, 19 nt, Artificial Sequence
  Synthetic oligonucleotide
uauaaaacucuguaacugc

SEQ ID NO: 848 - RNA, 19 nt, Artificial Sequence
  Synthetic oligonucleotide
caguuacagaguuuuauga

SEQ ID NO: 849 - RNA, 19 nt, Artificial Sequence
  Synthetic oligonucleotide
ucauaaaacucuguaacug

SEQ ID NO: 850 - RNA, 19 nt, Artificial Sequence
  Synthetic oligonucleotide
guuacagaguuuuaugcaa

SEQ ID NO: 851 - RNA, 19 nt, Artificial Sequence
  Synthetic oligonucleotide
uugcauaaaacucuguaac

SEQ ID NO: 852 - RNA, 19 nt, Artificial Sequence
  Synthetic oligonucleotide
uuacagaguuuuaugcaaa

SEQ ID NO: 853 - RNA, 19 nt, Artificial Sequence
  Synthetic oligonucleotide
uuugcauaaaacucuguaa

SEQ ID NO: 854 - RNA, 19 nt, Artificial Sequence
  Synthetic oligonucleotide
uacagaguuuuaugcaaaa

SEQ ID NO: 855 - RNA, 19 nt, Artificial Sequence
  Synthetic oligonucleotide
uuuugcauaaaacucugua

SEQ ID NO: 856 - RNA, 19 nt, Artificial Sequence
  Synthetic oligonucleotide
uuuuaugcaaaagauacaa

SEQ ID NO: 857 - RNA, 19 nt, Artificial Sequence
  Synthetic oligonucleotide
uuguaucuuuugcauaaaa

SEQ ID NO: 858 - RNA, 19 nt, Artificial Sequence
  Synthetic oligonucleotide
uaugcaaaagauacaguua

SEQ ID NO: 859 - RNA, 19 nt, Artificial Sequence
  Synthetic oligonucleotide
uaacuguaucuuuugcaua

SEQ ID NO: 860 - RNA, 19 nt, Artificial Sequence
  Synthetic oligonucleotide
ugcaaaagauacaguugaa

SEQ ID NO: 861 - RNA, 19 nt, Artificial Sequence
  Synthetic oligonucleotide
uucaacuguaucuuuugca

SEQ ID NO: 862 - RNA, 19 nt, Artificial Sequence
  Synthetic oligonucleotide
gcaaaagauacaguugaca

SEQ ID NO: 863 - RNA, 19 nt, Artificial Sequence
  Synthetic oligonucleotide
ugucaacuguaucuuuugc

SEQ ID NO: 864 - RNA, 19 nt, Artificial Sequence
  Synthetic oligonucleotide
caaaagauacaguugacaa

SEQ ID NO: 865 - RNA, 19 nt, Artificial Sequence
  Synthetic oligonucleotide
uugucaacuguaucuuuug

SEQ ID NO: 866 - RNA, 19 nt, Artificial Sequence
  Synthetic oligonucleotide
aaaagauacaguugacaua

SEQ ID NO: 867 - RNA, 19 nt, Artificial Sequence
  Synthetic oligonucleotide
uaugucaacuguaucuuuu

SEQ ID NO: 868 - RNA, 19 nt, Artificial Sequence
  Synthetic oligonucleotide
gauacaguugacaucaaaa

SEQ ID NO: 869 - RNA, 19 nt, Artificial Sequence
  Synthetic oligonucleotide
uuuugaugucaacuguauc

SEQ ID NO: 870 - RNA, 19 nt, Artificial Sequence
  Synthetic oligonucleotide
auacaguugacaucaaaga

SEQ ID NO: 871 - RNA, 19 nt, Artificial Sequence
  Synthetic oligonucleotide
ucuuugaugucaacuguau

SEQ ID NO: 872 - RNA, 19 nt, Artificial Sequence
  Synthetic oligonucleotide
uacaguugacaucaaagga

SEQ ID NO: 873 - RNA, 19 nt, Artificial Sequence
  Synthetic oligonucleotide
uccuuugaugucaacugua

SEQ ID NO: 874 - RNA, 19 nt, Artificial Sequence
  Synthetic oligonucleotide
acaguugacaucaaaggua

SEQ ID NO: 875 - RNA, 19 nt, Artificial Sequence
  Synthetic oligonucleotide
uaccuuugaugucaacugu

SEQ ID NO: 876 - RNA, 19 nt, Artificial Sequence
  Synthetic oligonucleotide
caguugacaucaaagguua

SEQ ID NO: 877 - RNA, 19 nt, Artificial Sequence
  Synthetic oligonucleotide
uaaccuuugaugucaacug

SEQ ID NO: 878 - RNA, 19 nt, Artificial Sequence
  Synthetic oligonucleotide
aguugacaucaaagguuca

SEQ ID NO: 879 - RNA, 19 nt, Artificial Sequence
  Synthetic oligonucleotide
ugaaccuuugaugucaacu

SEQ ID NO: 880 - RNA, 19 nt, Artificial Sequence
  Synthetic oligonucleotide
guugacaucaaagguucua

SEQ ID NO: 881 - RNA, 19 nt, Artificial Sequence
  Synthetic oligonucleotide
uagaaccuuugaugucaac

SEQ ID NO: 882 - RNA, 19 nt, Artificial Sequence
  Synthetic oligonucleotide
uugacaucaaagguucuca

SEQ ID NO: 883 - RNA, 19 nt, Artificial Sequence
  Synthetic oligonucleotide
ugagaaccuuugaugucaa

SEQ ID NO: 884 - RNA, 19 nt, Artificial Sequence
  Synthetic oligonucleotide
ugacaucaaagguucucaa

SEQ ID NO: 885 - RNA, 19 nt, Artificial Sequence
  Synthetic oligonucleotide
uugagaaccuuugauguca

SEQ ID NO: 886 - RNA, 19 nt, Artificial Sequence
  Synthetic oligonucleotide
gacaucaaagguucucaaa

SEQ ID NO: 887 - RNA, 19 nt, Artificial Sequence
  Synthetic oligonucleotide
uuugagaaccuuugauguc

SEQ ID NO: 888 - RNA, 19 nt, Artificial Sequence
  Synthetic oligonucleotide
ucaaagguucucaaauuaa

SEQ ID NO: 889 - RNA, 19 nt, Artificial Sequence
  Synthetic oligonucleotide
uuaauuugagaaccuuuga

SEQ ID NO: 890 - RNA, 19 nt, Artificial Sequence
  Synthetic oligonucleotide
aagguucucaaauuauuua

SEQ ID NO: 891 - RNA, 19 nt, Artificial Sequence
  Synthetic oligonucleotide
uaaauaauuugagaaccuu

SEQ ID NO: 892 - RNA, 19 nt, Artificial Sequence
  Synthetic oligonucleotide
ucaaauuauuucuggcaua

SEQ ID NO: 893 - RNA, 19 nt, Artificial Sequence
  Synthetic oligonucleotide
uaugccagaaauaauuuga

SEQ ID NO: 894 - RNA, 19 nt, Artificial Sequence
  Synthetic oligonucleotide
caaauuauuucuggcauua

SEQ ID NO: 895 - RNA, 19 nt, Artificial Sequence
  Synthetic oligonucleotide
uaaugccagaaauaauuug

SEQ ID NO: 896 - RNA, 19 nt, Artificial Sequence
  Synthetic oligonucleotide
aauuauuucuggcauugua

SEQ ID NO: 897 - RNA, 19 nt, Artificial Sequence
  Synthetic oligonucleotide
uacaaugccagaaauaauu

SEQ ID NO: 898 - RNA, 19 nt, Artificial Sequence
  Synthetic oligonucleotide
auuauuucuggcauuguua

SEQ ID NO: 899 - RNA, 19 nt, Artificial Sequence
  Synthetic oligonucleotide
uaacaaugccagaaauaau

SEQ ID NO: 900 - RNA, 19 nt, Artificial Sequence
  Synthetic oligonucleotide
uuauuucuggcauuguuaa

SEQ ID NO: 901 - RNA, 19 nt, Artificial Sequence
  Synthetic oligonucleotide
uuaacaaugccagaaauaa

SEQ ID NO: 902 - RNA, 19 nt, Artificial Sequence
  Synthetic oligonucleotide
uuucuggcauuguuaacua

SEQ ID NO: 903 - RNA, 19 nt, Artificial Sequence
  Synthetic oligonucleotide
uaguuaacaaugccagaaa

SEQ ID NO: 904 - RNA, 19 nt, Artificial Sequence
  Synthetic oligonucleotide
uucuggcauuguuaacuua

SEQ ID NO: 905 - RNA, 19 nt, Artificial Sequence
  Synthetic oligonucleotide
uaaguuaacaaugccagaa

SEQ ID NO: 906 - RNA, 19 nt, Artificial Sequence
  Synthetic oligonucleotide
cuggcauuguuaacuuaga

SEQ ID NO: 907 - RNA, 19 nt, Artificial Sequence
  Synthetic oligonucleotide
ucuaaguuaacaaugccag

SEQ ID NO: 908 - RNA, 19 nt, Artificial Sequence
  Synthetic oligonucleotide
gcauuguuaacuuagagaa

SEQ ID NO: 909 - RNA, 19 nt, Artificial Sequence
  Synthetic oligonucleotide
uucucuaaguuaacaaugc

SEQ ID NO: 910 - RNA, 19 nt, Artificial Sequence
  Synthetic oligonucleotide
guuaacuuagagaagccua

SEQ ID NO: 911 - RNA, 19 nt, Artificial Sequence
  Synthetic oligonucleotide
uaggcuucucuaaguuaac

SEQ ID NO: 912 - RNA, 19 nt, Artificial Sequence
  Synthetic oligonucleotide
uaacuuagagaagccugua

SEQ ID NO: 913 - RNA, 19 nt, Artificial Sequence
  Synthetic oligonucleotide
uacaggcuucucuaaguua

SEQ ID NO: 914 - RNA, 19 nt, Artificial Sequence
  Synthetic oligonucleotide
uagagaagccugugauuua

SEQ ID NO: 915 - RNA, 19 nt, Artificial Sequence
  Synthetic oligonucleotide
uaaaucacaggcuucucua

SEQ ID NO: 916 - RNA, 19 nt, Artificial Sequence
  Synthetic oligonucleotide
aagccugugauuugcucua

SEQ ID NO: 917 - RNA, 19 nt, Artificial Sequence
  Synthetic oligonucleotide
uagagcaaaucacaggcuu

SEQ ID NO: 918 - RNA, 19 nt, Artificial Sequence
  Synthetic oligonucleotide
gccugugauuugcucuuua

SEQ ID NO: 919 - RNA, 19 nt, Artificial Sequence
  Synthetic oligonucleotide
uaaagagcaaaucacaggc

SEQ ID NO: 920 - RNA, 19 nt, Artificial Sequence
  Synthetic oligonucleotide
ugugauuugcucuuuggca

SEQ ID NO: 921 - RNA, 19 nt, Artificial Sequence
  Synthetic oligonucleotide
ugccaaagagcaaaucaca

SEQ ID NO: 922 - RNA, 19 nt, Artificial Sequence
  Synthetic oligonucleotide
gugauuugcucuuuggcua

SEQ ID NO: 923 - RNA, 19 nt, Artificial Sequence
  Synthetic oligonucleotide
uagccaaagagcaaaucac

SEQ ID NO: 924 - RNA, 19 nt, Artificial Sequence
  Synthetic oligonucleotide
gcucuuuggcugccaucaa

SEQ ID NO: 925 - RNA, 19 nt, Artificial Sequence
  Synthetic oligonucleotide
uugauggcagccaaagagc

SEQ ID NO: 926 - RNA, 19 nt, Artificial Sequence
  Synthetic oligonucleotide
ucuuuggcugccaucauaa

SEQ ID NO: 927 - RNA, 19 nt, Artificial Sequence
  Synthetic oligonucleotide
uuaugauggcagccaaaga

SEQ ID NO: 928 - RNA, 19 nt, Artificial Sequence
  Synthetic oligonucleotide
cuuuggcugccaucauaaa

SEQ ID NO: 929 - RNA, 19 nt, Artificial Sequence
  Synthetic oligonucleotide
uuuaugauggcagccaaag

SEQ ID NO: 930 - RNA, 19 nt, Artificial Sequence
  Synthetic oligonucleotide
uuuggcugccaucauaaaa

SEQ ID NO: 931 - RNA, 19 nt, Artificial Sequence
  Synthetic oligonucleotide
uuuuaugauggcagccaaa

SEQ ID NO: 932 - RNA, 19 nt, Artificial Sequence
  Synthetic oligonucleotide
uggcugccaucauaaaaua

SEQ ID NO: 933 - RNA, 19 nt, Artificial Sequence
  Synthetic oligonucleotide
uauuuuaugauggcagcca

SEQ ID NO: 934 - RNA, 19 nt, Artificial Sequence
  Synthetic oligonucleotide
ggcugccaucauaaaauaa

SEQ ID NO: 935 - RNA, 19 nt, Artificial Sequence
  Synthetic oligonucleotide
uuauuuuaugauggcagcc

SEQ ID NO: 936 - RNA, 19 nt, Artificial Sequence
  Synthetic oligonucleotide
gcugccaucauaaaauaca

SEQ ID NO: 937 - RNA, 19 nt, Artificial Sequence
  Synthetic oligonucleotide
uguauuuuaugauggcagc

SEQ ID NO: 938 - RNA, 19 nt, Artificial Sequence
  Synthetic oligonucleotide
ugccaucauaaaauaccua

SEQ ID NO: 939 - RNA, 19 nt, Artificial Sequence
  Synthetic oligonucleotide
uagguauuuuaugauggca

SEQ ID NO: 940 - RNA, 19 nt, Artificial Sequence
  Synthetic oligonucleotide
gccaucauaaaauaccuca

SEQ ID NO: 941 - RNA, 19 nt, Artificial Sequence
  Synthetic oligonucleotide
ugagguauuuuaugauggc

SEQ ID NO: 942 - RNA, 19 nt, Artificial Sequence
  Synthetic oligonucleotide
caucauaaaauaccucaaa

SEQ ID NO: 943 - RNA, 19 nt, Artificial Sequence
  Synthetic oligonucleotide
uuugagguauuuuaugaug

SEQ ID NO: 944 - RNA, 19 nt, Artificial Sequence
  Synthetic oligonucleotide
cauaaaauaccucaaagaa

SEQ ID NO: 945 - RNA, 19 nt, Artificial Sequence
  Synthetic oligonucleotide
uucuuugagguauuuuaug

SEQ ID NO: 946 - RNA, 19 nt, Artificial Sequence
  Synthetic oligonucleotide
uaccucaaagaauucaaca

SEQ ID NO: 947 - RNA, 19 nt, Artificial Sequence
  Synthetic oligonucleotide
uguugaauucuuugaggua

SEQ ID NO: 948 - RNA, 19 nt, Artificial Sequence
  Synthetic oligonucleotide
ccucaaagaauucaacuua

SEQ ID NO: 949 - RNA, 19 nt, Artificial Sequence
  Synthetic oligonucleotide
uaaguugaauucuuugagg

SEQ ID NO: 950 - RNA, 19 nt, Artificial Sequence
  Synthetic oligonucleotide
ucaacuuggaaaagaugca

SEQ ID NO: 951 - RNA, 19 nt, Artificial Sequence
  Synthetic oligonucleotide
ugcaucuuuuccaaguuga

SEQ ID NO: 952 - RNA, 19 nt, Artificial Sequence
  Synthetic oligonucleotide
caacuuggaaaagaugcua

SEQ ID NO: 953 - RNA, 19 nt, Artificial Sequence
  Synthetic oligonucleotide
uagcaucuuuuccaaguug

SEQ ID NO: 954 - RNA, 19 nt, Artificial Sequence
  Synthetic oligonucleotide
ggaaaagaugcucuccaaa

SEQ ID NO: 955 - RNA, 19 nt, Artificial Sequence
  Synthetic oligonucleotide
uuuggagagcaucuuuucc

SEQ ID NO: 956 - RNA, 19 nt, Artificial Sequence
  Synthetic oligonucleotide
aaagaugcucuccaaacca

SEQ ID NO: 957 - RNA, 19 nt, Artificial Sequence
  Synthetic oligonucleotide
ugguuuggagagcaucuuu

SEQ ID NO: 958 - RNA, 19 nt, Artificial Sequence
  Synthetic oligonucleotide
gaugcucuccaaaccugaa

SEQ ID NO: 959 - RNA, 19 nt, Artificial Sequence
  Synthetic oligonucleotide
uucagguuuggagagcauc

SEQ ID NO: 960 - RNA, 19 nt, Artificial Sequence
  Synthetic oligonucleotide
augcucuccaaaccugaga

SEQ ID NO: 961 - RNA, 19 nt, Artificial Sequence
  Synthetic oligonucleotide
ucucagguuuggagagcau

SEQ ID NO: 962 - RNA, 19 nt, Artificial Sequence
  Synthetic oligonucleotide
gcucuccaaaccugagaaa

SEQ ID NO: 963 - RNA, 19 nt, Artificial Sequence
  Synthetic oligonucleotide
uuucucagguuuggagagc

SEQ ID NO: 964 - RNA, 19 nt, Artificial Sequence
  Synthetic oligonucleotide
cucuccaaaccugagaaua

SEQ ID NO: 965 - RNA, 19 nt, Artificial Sequence
  Synthetic oligonucleotide
uauucucagguuuggagag

SEQ ID NO: 966 - RNA, 19 nt, Artificial Sequence
  Synthetic oligonucleotide
ucuccaaaccugagaauua

SEQ ID NO: 967 - RNA, 19 nt, Artificial Sequence
  Synthetic oligonucleotide
uaauucucagguuuggaga

SEQ ID NO: 968 - RNA, 19 nt, Artificial Sequence
  Synthetic oligonucleotide
cuccaaaccugagaauuua

SEQ ID NO: 969 - RNA, 19 nt, Artificial Sequence
  Synthetic oligonucleotide
uaaauucucagguuuggag

SEQ ID NO: 970 - RNA, 19 nt, Artificial Sequence
  Synthetic oligonucleotide
aaccugagaauuuuaaaca

SEQ ID NO: 971 - RNA, 19 nt, Artificial Sequence
  Synthetic oligonucleotide
uguuuaaaauucucagguu

SEQ ID NO: 972 - RNA, 19 nt, Artificial Sequence
  Synthetic oligonucleotide
ccugagaauuuuaaacaga

SEQ ID NO: 973 - RNA, 19 nt, Artificial Sequence
  Synthetic oligonucleotide
ucuguuuaaaauucucagg

SEQ ID NO: 974 - RNA, 19 nt, Artificial Sequence
  Synthetic oligonucleotide
cugagaauuuuaaacagca

SEQ ID NO: 975 - RNA, 19 nt, Artificial Sequence
  Synthetic oligonucleotide
ugcuguuuaaaauucucag

SEQ ID NO: 976 - RNA, 19 nt, Artificial Sequence
  Synthetic oligonucleotide
gagaauuuuaaacagcuaa

SEQ ID NO: 977 - RNA, 19 nt, Artificial Sequence
  Synthetic oligonucleotide
uuagcuguuuaaaauucuc

SEQ ID NO: 978 - RNA, 19 nt, Artificial Sequence
  Synthetic oligonucleotide
agaauuuuaaacagcuaua

SEQ ID NO: 979 - RNA, 19 nt, Artificial Sequence
  Synthetic oligonucleotide
uauagcuguuuaaaauucu

SEQ ID NO: 980 - RNA, 19 nt, Artificial Sequence
  Synthetic oligonucleotide
gaauuuuaaacagcuauca

SEQ ID NO: 981 - RNA, 19 nt, Artificial Sequence
  Synthetic oligonucleotide
ugauagcuguuuaaaauuc

SEQ ID NO: 982 - RNA, 19 nt, Artificial Sequence
  Synthetic oligonucleotide
uaaacagcuaucaaguaaa

SEQ ID NO: 983 - RNA, 19 nt, Artificial Sequence
  Synthetic oligonucleotide
uuuacuugauagcuguuua

SEQ ID NO: 984 - RNA, 19 nt, Artificial Sequence
  Synthetic oligonucleotide
aaacagcuaucaaguaaaa

SEQ ID NO: 985 - RNA, 19 nt, Artificial Sequence
  Synthetic oligonucleotide
uuuuacuugauagcuguuu

SEQ ID NO: 986 - RNA, 19 nt, Artificial Sequence
  Synthetic oligonucleotide
cagcuaucaaguaaaauga

SEQ ID NO: 987 - RNA, 19 nt, Artificial Sequence
  Synthetic oligonucleotide
ucauuuuacuugauagcug

SEQ ID NO: 988 - RNA, 19 nt, Artificial Sequence
  Synthetic oligonucleotide
gcuaucaaguaaaauggaa

SEQ ID NO: 989 - RNA, 19 nt, Artificial Sequence
  Synthetic oligonucleotide
uuccauuuuacuugauagc

SEQ ID NO: 990 - RNA, 19 nt, Artificial Sequence
  Synthetic oligonucleotide
cuaucaaguaaaauggaaa

SEQ ID NO: 991 - RNA, 19 nt, Artificial Sequence
  Synthetic oligonucleotide
uuuccauuuuacuugauag

SEQ ID NO: 992 - RNA, 19 nt, Artificial Sequence
  Synthetic oligonucleotide
uaucaaguaaaauggaaua

SEQ ID NO: 993 - RNA, 19 nt, Artificial Sequence
  Synthetic oligonucleotide
uauuccauuuuacuugaua

SEQ ID NO: 994 - RNA, 19 nt, Artificial Sequence
  Synthetic oligonucleotide
ucaaguaaaauggaauuua

SEQ ID NO: 995 - RNA, 19 nt, Artificial Sequence
  Synthetic oligonucleotide
uaaauuccauuuuacuuga

SEQ ID NO: 996 - RNA, 19 nt, Artificial Sequence
  Synthetic oligonucleotide
caaguaaaauggaauuuaa

SEQ ID NO: 997 - RNA, 19 nt, Artificial Sequence
  Synthetic oligonucleotide
uuaaauuccauuuuacuug

SEQ ID NO: 998 - RNA, 19 nt, Artificial Sequence
  Synthetic oligonucleotide
aaaauggaauuuaugacaa

SEQ ID NO: 999 - RNA, 19 nt, Artificial Sequence
  Synthetic oligonucleotide
uugucauaaauuccauuuu

SEQ ID NO: 1000 - RNA, 19 nt, Artificial Sequence
  Synthetic oligonucleotide
aauggaauuuaugacaaua

SEQ ID NO: 1001 - RNA, 19 nt, Artificial Sequence
  Synthetic oligonucleotide
uauugucauaaauuccauu

SEQ ID NO: 1002 - RNA, 19 nt, Artificial Sequence
  Synthetic oligonucleotide
auggaauuuaugacaauua

SEQ ID NO: 1003 - RNA, 19 nt, Artificial Sequence
  Synthetic oligonucleotide
uaauugucauaaauuccau

SEQ ID NO: 1004 - RNA, 19 nt, Artificial Sequence
  Synthetic oligonucleotide
aauuuaugacaauuaauga

SEQ ID NO: 1005 - RNA, 19 nt, Artificial Sequence
  Synthetic oligonucleotide
ucauuaauugucauaaauu

SEQ ID NO: 1006 - RNA, 19 nt, Artificial Sequence
  Synthetic oligonucleotide
uuaugacaauuaauggaaa

SEQ ID NO: 1007 - RNA, 19 nt, Artificial Sequence
  Synthetic oligonucleotide
uuuccauuaauugucauaa

SEQ ID NO: 1008 - RNA, 19 nt, Artificial Sequence
  Synthetic oligonucleotide
uaugacaauuaauggaaca

SEQ ID NO: 1009 - RNA, 19 nt, Artificial Sequence
  Synthetic oligonucleotide
uguuccauuaauugucaua

SEQ ID NO: 1010 - RNA, 19 nt, Artificial Sequence
  Synthetic oligonucleotide
augacaauuaauggaacaa

SEQ ID NO: 1011 - RNA, 19 nt, Artificial Sequence
  Synthetic oligonucleotide
uuguuccauuaauugucau

SEQ ID NO: 1012 - RNA, 19 nt, Artificial Sequence
  Synthetic oligonucleotide
ugacaauuaauggaacaaa

SEQ ID NO: 1013 - RNA, 19 nt, Artificial Sequence
  Synthetic oligonucleotide
uuuguuccauuaauuguca

SEQ ID NO: 1014 - RNA, 19 nt, Artificial Sequence
  Synthetic oligonucleotide
gacaauuaauggaacaaca

SEQ ID NO: 1015 - RNA, 19 nt, Artificial Sequence
  Synthetic oligonucleotide
uguuguuccauuaauuguc

SEQ ID NO: 1016 - RNA, 19 nt, Artificial Sequence
  Synthetic oligonucleotide
acaauuaauggaacaacaa

SEQ ID NO: 1017 - RNA, 19 nt, Artificial Sequence
  Synthetic oligonucleotide
uuguuguuccauuaauugu

SEQ ID NO: 1018 - RNA, 19 nt, Artificial Sequence
  Synthetic oligonucleotide
aauggaacaacauuaagga

SEQ ID NO: 1019 - RNA, 19 nt, Artificial Sequence
  Synthetic oligonucleotide
uccuuaauguuguuccauu

SEQ ID NO: 1020 - RNA, 19 nt, Artificial Sequence
  Synthetic oligonucleotide
ggaacaacauuaaggaaua

SEQ ID NO: 1021 - RNA, 19 nt, Artificial Sequence
  Synthetic oligonucleotide
uauuccuuaauguuguucc

SEQ ID NO: 1022 - RNA, 19 nt, Artificial Sequence
  Synthetic oligonucleotide
caacauuaaggaaucugga

SEQ ID NO: 1023 - RNA, 19 nt, Artificial Sequence
  Synthetic oligonucleotide
uccagauuccuuaauguug

SEQ ID NO: 1024 - RNA, 19 nt, Artificial Sequence
  Synthetic oligonucleotide
uaaggaaucuggaaaucca

SEQ ID NO: 1025 - RNA, 19 nt, Artificial Sequence
  Synthetic oligonucleotide
uggauuuccagauuccuua

SEQ ID NO: 1026 - RNA, 19 nt, Artificial Sequence
  Synthetic oligonucleotide
ggaaucuggaaauccuaca

SEQ ID NO: 1027 - RNA, 19 nt, Artificial Sequence
  Synthetic oligonucleotide
uguaggauuuccagauucc

SEQ ID NO: 1028 - RNA, 19 nt, Artificial Sequence
  Synthetic oligonucleotide
gaaucuggaaauccuacaa

SEQ ID NO: 1029 - RNA, 19 nt, Artificial Sequence
  Synthetic oligonucleotide
uuguaggauuuccagauuc

SEQ ID NO: 1030 - RNA, 19 nt, Artificial Sequence
  Synthetic oligonucleotide
ucuggaaauccuacagaaa

SEQ ID NO: 1031 - RNA, 19 nt, Artificial Sequence
  Synthetic oligonucleotide
uuucuguaggauuuccaga

SEQ ID NO: 1032 - RNA, 19 nt, Artificial Sequence
  Synthetic oligonucleotide
cuggaaauccuacagaaua

SEQ ID NO: 1033 - RNA, 19 nt, Artificial Sequence
  Synthetic oligonucleotide
uauucuguaggauuuccag

SEQ ID NO: 1034 - RNA, 19 nt, Artificial Sequence
  Synthetic oligonucleotide
uggaaauccuacagaauca

SEQ ID NO: 1035 - RNA, 19 nt, Artificial Sequence
  Synthetic oligonucleotide
ugauucuguaggauuucca

SEQ ID NO: 1036 - RNA, 19 nt, Artificial Sequence
  Synthetic oligonucleotide
gaaauccuacagaaucaga

SEQ ID NO: 1037 - RNA, 19 nt, Artificial Sequence
  Synthetic oligonucleotide
ucugauucuguaggauuuc

SEQ ID NO: 1038 - RNA, 19 nt, Artificial Sequence
  Synthetic oligonucleotide
aauccuacagaaucagaca

SEQ ID NO: 1039 - RNA, 19 nt, Artificial Sequence
  Synthetic oligonucleotide
ugucugauucuguaggauu

SEQ ID NO: 1040 - RNA, 19 nt, Artificial Sequence
  Synthetic oligonucleotide
auccuacagaaucagacua

SEQ ID NO: 1041 - RNA, 19 nt, Artificial Sequence
  Synthetic oligonucleotide
uagucugauucuguaggau

SEQ ID NO: 1042 - RNA, 19 nt, Artificial Sequence
  Synthetic oligonucleotide
uccuacagaaucagacuga

SEQ ID NO: 1043 - RNA, 19 nt, Artificial Sequence
  Synthetic oligonucleotide
ucagucugauucuguagga

SEQ ID NO: 1044 - RNA, 19 nt, Artificial Sequence
  Synthetic oligonucleotide
ccuacagaaucagacugaa

SEQ ID NO: 1045 - RNA, 19 nt, Artificial Sequence
  Synthetic oligonucleotide
uucagucugauucuguagg

SEQ ID NO: 1046 - RNA, 19 nt, Artificial Sequence
  Synthetic oligonucleotide
cuacagaaucagacugaua

SEQ ID NO: 1047 - RNA, 19 nt, Artificial Sequence
  Synthetic oligonucleotide
uaucagucugauucuguag

SEQ ID NO: 1048 - RNA, 19 nt, Artificial Sequence
  Synthetic oligonucleotide
uacagaaucagacugauaa

SEQ ID NO: 1049 - RNA, 19 nt, Artificial Sequence
  Synthetic oligonucleotide
uuaucagucugauucugua

SEQ ID NO: 1050 - RNA, 19 nt, Artificial Sequence
  Synthetic oligonucleotide
acagaaucagacugauaua

SEQ ID NO: 1051 - RNA, 19 nt, Artificial Sequence
  Synthetic oligonucleotide
uauaucagucugauucugu

SEQ ID NO: 1052 - RNA, 19 nt, Artificial Sequence
  Synthetic oligonucleotide
cagaaucagacugauauga

SEQ ID NO: 1053 - RNA, 19 nt, Artificial Sequence
  Synthetic oligonucleotide
ucauaucagucugauucug

SEQ ID NO: 1054 - RNA, 19 nt, Artificial Sequence
  Synthetic oligonucleotide
ucagacugauaugaaaaca

SEQ ID NO: 1055 - RNA, 19 nt, Artificial Sequence
  Synthetic oligonucleotide
uguuuucauaucagucuga

SEQ ID NO: 1056 - RNA, 19 nt, Artificial Sequence
  Synthetic oligonucleotide
gacugauaugaaaaccaaa

SEQ ID NO: 1057 - RNA, 19 nt, Artificial Sequence
  Synthetic oligonucleotide
uuugguuuucauaucaguc

SEQ ID NO: 1058 - RNA, 19 nt, Artificial Sequence
  Synthetic oligonucleotide
acugauaugaaaaccaaaa

SEQ ID NO: 1059 - RNA, 19 nt, Artificial Sequence
  Synthetic oligonucleotide
uuuugguuuucauaucagu

SEQ ID NO: 1060 - RNA, 19 nt, Artificial Sequence
  Synthetic oligonucleotide
cugauaugaaaaccaaaga

SEQ ID NO: 1061 - RNA, 19 nt, Artificial Sequence
  Synthetic oligonucleotide
ucuuugguuuucauaucag

SEQ ID NO: 1062 - RNA, 19 nt, Artificial Sequence
  Synthetic oligonucleotide
gauaugaaaaccaaaggaa

SEQ ID NO: 1063 - RNA, 19 nt, Artificial Sequence
  Synthetic oligonucleotide
uuccuuugguuuucauauc

SEQ ID NO: 1064 - RNA, 19 nt, Artificial Sequence
  Synthetic oligonucleotide
gaaaaccaaaggaaguuua

SEQ ID NO: 1065 - RNA, 19 nt, Artificial Sequence
  Synthetic oligonucleotide
uaaacuuccuuugguuuuc

SEQ ID NO: 1066 - RNA, 19 nt, Artificial Sequence
  Synthetic oligonucleotide
aaaaccaaaggaaguuuga

SEQ ID NO: 1067 - RNA, 19 nt, Artificial Sequence
  Synthetic oligonucleotide
ucaaacuuccuuugguuuu

SEQ ID NO: 1068 - RNA, 19 nt, Artificial Sequence
  Synthetic oligonucleotide
aaaccaaaggaaguuugca

SEQ ID NO: 1069 - RNA, 19 nt, Artificial Sequence
  Synthetic oligonucleotide
ugcaaacuuccuuugguuu

SEQ ID NO: 1070 - RNA, 19 nt, Artificial Sequence
  Synthetic oligonucleotide
accaaaggaaguuugcuga

SEQ ID NO: 1071 - RNA, 19 nt, Artificial Sequence
  Synthetic oligonucleotide
ucagcaaacuuccuuuggu

SEQ ID NO: 1072 - RNA, 19 nt, Artificial Sequence
  Synthetic oligonucleotide
ggaaguuugcuguggguua

SEQ ID NO: 1073 - RNA, 19 nt, Artificial Sequence
  Synthetic oligonucleotide
uaacccacagcaaacuucc

SEQ ID NO: 1074 - RNA, 19 nt, Artificial Sequence
  Synthetic oligonucleotide
aguuugcuguggguuuuaa

SEQ ID NO: 1075 - RNA, 19 nt, Artificial Sequence
  Synthetic oligonucleotide
uuaaaacccacagcaaacu

SEQ ID NO: 1076 - RNA, 19 nt, Artificial Sequence
  Synthetic oligonucleotide
uugcuguggguuuuagaca

SEQ ID NO: 1077 - RNA, 19 nt, Artificial Sequence
  Synthetic oligonucleotide
ugucuaaaacccacagcaa

SEQ ID NO: 1078 - RNA, 19 nt, Artificial Sequence
  Synthetic oligonucleotide
ugcuguggguuuuagacca

SEQ ID NO: 1079 - RNA, 19 nt, Artificial Sequence
  Synthetic oligonucleotide
uggucuaaaacccacagca

SEQ ID NO: 1080 - RNA, 19 nt, Artificial Sequence
  Synthetic oligonucleotide
gcuguggguuuuagaccaa

SEQ ID NO: 1081 - RNA, 19 nt, Artificial Sequence
  Synthetic oligonucleotide
uuggucuaaaacccacagc

SEQ ID NO: 1082 - RNA, 19 nt, Artificial Sequence
  Synthetic oligonucleotide
cuguggguuuuagaccaca

SEQ ID NO: 1083 - RNA, 19 nt, Artificial Sequence
  Synthetic oligonucleotide
uguggucuaaaacccacag

SEQ ID NO: 1084 - RNA, 19 nt, Artificial Sequence
  Synthetic oligonucleotide
uggguuuuagaccacacua

SEQ ID NO: 1085 - RNA, 19 nt, Artificial Sequence
  Synthetic oligonucleotide
uaguguggucuaaaaccca

SEQ ID NO: 1086 - RNA, 19 nt, Artificial Sequence
  Synthetic oligonucleotide
gguuuuagaccacacuaaa

SEQ ID NO: 1087 - RNA, 19 nt, Artificial Sequence
  Synthetic oligonucleotide
uuuaguguggucuaaaacc

SEQ ID NO: 1088 - RNA, 19 nt, Artificial Sequence
  Synthetic oligonucleotide
guuuuagaccacacuaaaa

SEQ ID NO: 1089 - RNA, 19 nt, Artificial Sequence
  Synthetic oligonucleotide
uuuuaguguggucuaaaac

SEQ ID NO: 1090 - RNA, 19 nt, Artificial Sequence
  Synthetic oligonucleotide
uuuagaccacacuaaaaca

SEQ ID NO: 1091 - RNA, 19 nt, Artificial Sequence
  Synthetic oligonucleotide
uguuuuaguguggucuaaa

SEQ ID NO: 1092 - RNA, 19 nt, Artificial Sequence
  Synthetic oligonucleotide
uuagaccacacuaaaacua

SEQ ID NO: 1093 - RNA, 19 nt, Artificial Sequence
  Synthetic oligonucleotide
uaguuuuaguguggucuaa

SEQ ID NO: 1094 - RNA, 19 nt, Artificial Sequence
  Synthetic oligonucleotide
uagaccacacuaaaacuua

SEQ ID NO: 1095 - RNA, 19 nt, Artificial Sequence
  Synthetic oligonucleotide
uaaguuuuaguguggucua

SEQ ID NO: 1096 - RNA, 19 nt, Artificial Sequence
  Synthetic oligonucleotide
agaccacacuaaaacuuca

SEQ ID NO: 1097 - RNA, 19 nt, Artificial Sequence
  Synthetic oligonucleotide
ugaaguuuuaguguggucu

SEQ ID NO: 1098 - RNA, 19 nt, Artificial Sequence
  Synthetic oligonucleotide
ccacacuaaaacuucauua

SEQ ID NO: 1099 - RNA, 19 nt, Artificial Sequence
  Synthetic oligonucleotide
uaaugaaguuuuagugugg

SEQ ID NO: 1100 - RNA, 19 nt, Artificial Sequence
  Synthetic oligonucleotide
cacuaaaacuucauuugga

SEQ ID NO: 1101 - RNA, 19 nt, Artificial Sequence
  Synthetic oligonucleotide
uccaaaugaaguuuuagug

SEQ ID NO: 1102 - RNA, 19 nt, Artificial Sequence
  Synthetic oligonucleotide
acuaaaacuucauuuggga

SEQ ID NO: 1103 - RNA, 19 nt, Artificial Sequence
  Synthetic oligonucleotide
ucccaaaugaaguuuuagu

SEQ ID NO: 1104 - RNA, 19 nt, Artificial Sequence
  Synthetic oligonucleotide
uaaaacuucauuugggaga

SEQ ID NO: 1105 - RNA, 19 nt, Artificial Sequence
  Synthetic oligonucleotide
ucucccaaaugaaguuuua

SEQ ID NO: 1106 - RNA, 19 nt, Artificial Sequence
  Synthetic oligonucleotide
auuugggagacggaaguua

SEQ ID NO: 1107 - RNA, 19 nt, Artificial Sequence
  Synthetic oligonucleotide
uaacuuccgucucccaaau

SEQ ID NO: 1108 - RNA, 19 nt, Artificial Sequence
  Synthetic oligonucleotide
uugggagacggaaguuaaa

SEQ ID NO: 1109 - RNA, 19 nt, Artificial Sequence
  Synthetic oligonucleotide
uuuaacuuccgucucccaa

SEQ ID NO: 1110 - RNA, 19 nt, Artificial Sequence
  Synthetic oligonucleotide
gggagacggaaguuaaaga

SEQ ID NO: 1111 - RNA, 19 nt, Artificial Sequence
  Synthetic oligonucleotide
ucuuuaacuuccgucuccc

SEQ ID NO: 1112 - RNA, 19 nt, Artificial Sequence
  Synthetic oligonucleotide
ggagacggaaguuaaagaa

SEQ ID NO: 1113 - RNA, 19 nt, Artificial Sequence
  Synthetic oligonucleotide
uucuuuaacuuccgucucc

SEQ ID NO: 1114 - RNA, 19 nt, Artificial Sequence
  Synthetic oligonucleotide
gacggaaguuaaagaagua

SEQ ID NO: 1115 - RNA, 19 nt, Artificial Sequence
  Synthetic oligonucleotide
uacuucuuuaacuuccguc

SEQ ID NO: 1116 - RNA, 19 nt, Artificial Sequence
  Synthetic oligonucleotide
acggaaguuaaagaaguga

SEQ ID NO: 1117 - RNA, 19 nt, Artificial Sequence
  Synthetic oligonucleotide
ucacuucuuuaacuuccgu

SEQ ID NO: 1118 - RNA, 19 nt, Artificial Sequence
  Synthetic oligonucleotide
cggaaguuaaagaagugga

SEQ ID NO: 1119 - RNA, 19 nt, Artificial Sequence
  Synthetic oligonucleotide
uccacuucuuuaacuuccg

SEQ ID NO: 1120 - RNA, 19 nt, Artificial Sequence
  Synthetic oligonucleotide
gugacccagccacuccuua

SEQ ID NO: 1121 - RNA, 19 nt, Artificial Sequence
  Synthetic oligonucleotide
uaaggaguggcugggucac

SEQ ID NO: 1122 - RNA, 19 nt, Artificial Sequence
  Synthetic oligonucleotide
ugacccagccacuccuuaa

SEQ ID NO: 1123 - RNA, 19 nt, Artificial Sequence
  Synthetic oligonucleotide
uuaaggaguggcuggguca

SEQ ID NO: 1124 - RNA, 19 nt, Artificial Sequence
  Synthetic oligonucleotide
acccagccacuccuuaaaa

SEQ ID NO: 1125 - RNA, 19 nt, Artificial Sequence
  Synthetic oligonucleotide
uuuuaaggaguggcugggu

SEQ ID NO: 1126 - RNA, 19 nt, Artificial Sequence
  Synthetic oligonucleotide
cccagccacuccuuaaaua

SEQ ID NO: 1127 - RNA, 19 nt, Artificial Sequence
  Synthetic oligonucleotide
uauuuaaggaguggcuggg

SEQ ID NO: 1128 - RNA, 19 nt, Artificial Sequence
  Synthetic oligonucleotide
gccacuccuuaaauuaaga

SEQ ID NO: 1129 - RNA, 19 nt, Artificial Sequence
  Synthetic oligonucleotide
ucuuaauuuaaggaguggc

SEQ ID NO: 1130 - RNA, 19 nt, Artificial Sequence
  Synthetic oligonucleotide
cacuccuuaaauuaaggga

SEQ ID NO: 1131 - RNA, 19 nt, Artificial Sequence
  Synthetic oligonucleotide
ucccuuaauuuaaggagug

SEQ ID NO: 1132 - RNA, 19 nt, Artificial Sequence
  Synthetic oligonucleotide
acuccuuaaauuaagggaa

SEQ ID NO: 1133 - RNA, 19 nt, Artificial Sequence
  Synthetic oligonucleotide
uucccuuaauuuaaggagu

SEQ ID NO: 1134 - RNA, 19 nt, Artificial Sequence
  Synthetic oligonucleotide
cuccuuaaauuaagggaaa

SEQ ID NO: 1135 - RNA, 19 nt, Artificial Sequence
  Synthetic oligonucleotide
uuucccuuaauuuaaggag

SEQ ID NO: 1136 - RNA, 19 nt, Artificial Sequence
  Synthetic oligonucleotide
ccuuaaauuaagggaaaua

SEQ ID NO: 1137 - RNA, 19 nt, Artificial Sequence
  Synthetic oligonucleotide
uauuucccuuaauuuaagg

SEQ ID NO: 1138 - RNA, 19 nt, Artificial Sequence
  Synthetic oligonucleotide
uaaauuaagggaaauaaaa

SEQ ID NO: 1139 - RNA, 19 nt, Artificial Sequence
  Synthetic oligonucleotide
uuuuauuucccuuaauuua

SEQ ID NO: 1140 - RNA, 19 nt, Artificial Sequence
  Synthetic oligonucleotide
uuaagggaaauaaaugcca

SEQ ID NO: 1141 - RNA, 19 nt, Artificial Sequence
  Synthetic oligonucleotide
uggcauuuauuucccuuaa

SEQ ID NO: 1142 - RNA, 19 nt, Artificial Sequence
  Synthetic oligonucleotide
auaaaugcccggcuugaua

SEQ ID NO: 1143 - RNA, 19 nt, Artificial Sequence
  Synthetic oligonucleotide
uaucaagccgggcauuuau

SEQ ID NO: 1144 - RNA, 19 nt, Artificial Sequence
  Synthetic oligonucleotide
aaaugcccggcuugaugca

SEQ ID NO: 1145 - RNA, 19 nt, Artificial Sequence
  Synthetic oligonucleotide
ugcaucaagccgggcauuu

SEQ ID NO: 1146 - RNA, 19 nt, Artificial Sequence
  Synthetic oligonucleotide
aaugcccggcuugaugcua

SEQ ID NO: 1147 - RNA, 19 nt, Artificial Sequence
  Synthetic oligonucleotide
uagcaucaagccgggcauu

SEQ ID NO: 1148 - RNA, 19 nt, Artificial Sequence
  Synthetic oligonucleotide
augcccggcuugaugcuga

SEQ ID NO: 1149 - RNA, 19 nt, Artificial Sequence
  Synthetic oligonucleotide
ucagcaucaagccgggcau

SEQ ID NO: 1150 - RNA, 19 nt, Artificial Sequence
  Synthetic oligonucleotide
ugcccggcuugaugcugua

SEQ ID NO: 1151 - RNA, 19 nt, Artificial Sequence
  Synthetic oligonucleotide
uacagcaucaagccgggca

SEQ ID NO: 1152 - RNA, 19 nt, Artificial Sequence
  Synthetic oligonucleotide
gcccggcuugaugcuguaa

SEQ ID NO: 1153 - RNA, 19 nt, Artificial Sequence
  Synthetic oligonucleotide
uuacagcaucaagccgggc

SEQ ID NO: 1154 - RNA, 19 nt, Artificial Sequence
  Synthetic oligonucleotide
cggcuugaugcuguaucga

SEQ ID NO: 1155 - RNA, 19 nt, Artificial Sequence
  Synthetic oligonucleotide
ucgauacagcaucaagccg

SEQ ID NO: 1156 - RNA, 19 nt, Artificial Sequence
  Synthetic oligonucleotide
ggcuugaugcuguaucgga

SEQ ID NO: 1157 - RNA, 19 nt, Artificial Sequence
  Synthetic oligonucleotide
uccgauacagcaucaagcc

SEQ ID NO: 1158 - RNA, 19 nt, Artificial Sequence
  Synthetic oligonucleotide
gcuugaugcuguaucggaa

SEQ ID NO: 1159 - RNA, 19 nt, Artificial Sequence
  Synthetic oligonucleotide
uuccgauacagcaucaagc

SEQ ID NO: 1160 - RNA, 19 nt, Artificial Sequence
  Synthetic oligonucleotide
uugaugcuguaucggaaga

SEQ ID NO: 1161 - RNA, 19 nt, Artificial Sequence
  Synthetic oligonucleotide
ucuuccgauacagcaucaa

SEQ ID NO: 1162 - RNA, 19 nt, Artificial Sequence
  Synthetic oligonucleotide
ugaugcuguaucggaagua

SEQ ID NO: 1163 - RNA, 19 nt, Artificial Sequence
  Synthetic oligonucleotide
uacuuccgauacagcauca

SEQ ID NO: 1164 - RNA, 19 nt, Artificial Sequence
  Synthetic oligonucleotide
gaugcuguaucggaaguua

SEQ ID NO: 1165 - RNA, 19 nt, Artificial Sequence
  Synthetic oligonucleotide
uaacuuccgauacagcauc

SEQ ID NO: 1166 - RNA, 19 nt, Artificial Sequence
  Synthetic oligonucleotide
augcuguaucggaaguuca

SEQ ID NO: 1167 - RNA, 19 nt, Artificial Sequence
  Synthetic oligonucleotide
ugaacuuccgauacagcau

SEQ ID NO: 1168 - RNA, 19 nt, Artificial Sequence
  Synthetic oligonucleotide
gcuguaucggaaguucuca

SEQ ID NO: 1169 - RNA, 19 nt, Artificial Sequence
  Synthetic oligonucleotide
ugagaacuuccgauacagc

SEQ ID NO: 1170 - RNA, 19 nt, Artificial Sequence
  Synthetic oligonucleotide
cuguaucggaaguucucca

SEQ ID NO: 1171 - RNA, 19 nt, Artificial Sequence
  Synthetic oligonucleotide
uggagaacuuccgauacag

SEQ ID NO: 1172 - RNA, 19 nt, Artificial Sequence
  Synthetic oligonucleotide
uguaucggaaguucuccaa

SEQ ID NO: 1173 - RNA, 19 nt, Artificial Sequence
  Synthetic oligonucleotide
uuggagaacuuccgauaca

SEQ ID NO: 1174 - RNA, 19 nt, Artificial Sequence
  Synthetic oligonucleotide
guaucggaaguucuccaua

SEQ ID NO: 1175 - RNA, 19 nt, Artificial Sequence
  Synthetic oligonucleotide
uauggagaacuuccgauac

SEQ ID NO: 1176 - RNA, 19 nt, Artificial Sequence
  Synthetic oligonucleotide
aucggaaguucuccauuca

SEQ ID NO: 1177 - RNA, 19 nt, Artificial Sequence
  Synthetic oligonucleotide
ugaauggagaacuuccgau

SEQ ID NO: 1178 - RNA, 19 nt, Artificial Sequence
  Synthetic oligonucleotide
ucggaaguucuccauucaa

SEQ ID NO: 1179 - RNA, 19 nt, Artificial Sequence
  Synthetic oligonucleotide
uugaauggagaacuuccga

SEQ ID NO: 1180 - RNA, 19 nt, Artificial Sequence
  Synthetic oligonucleotide
cggaaguucuccauucaga

SEQ ID NO: 1181 - RNA, 19 nt, Artificial Sequence
  Synthetic oligonucleotide
ucugaauggagaacuuccg

SEQ ID NO: 1182 - RNA, 19 nt, Artificial Sequence
  Synthetic oligonucleotide
aguucuccauucagaauca

SEQ ID NO: 1183 - RNA, 19 nt, Artificial Sequence
  Synthetic oligonucleotide
ugauucugaauggagaacu

SEQ ID NO: 1184 - RNA, 19 nt, Artificial Sequence
  Synthetic oligonucleotide
guucuccauucagaaucua

SEQ ID NO: 1185 - RNA, 19 nt, Artificial Sequence
  Synthetic oligonucleotide
uagauucugaauggagaac

SEQ ID NO: 1186 - RNA, 19 nt, Artificial Sequence
  Synthetic oligonucleotide
cuccauucagaaucuagua

SEQ ID NO: 1187 - RNA, 19 nt, Artificial Sequence
  Synthetic oligonucleotide
uacuagauucugaauggag

SEQ ID NO: 1188 - RNA, 19 nt, Artificial Sequence
  Synthetic oligonucleotide
uccauucagaaucuaguga

SEQ ID NO: 1189 - RNA, 19 nt, Artificial Sequence
  Synthetic oligonucleotide
ucacuagauucugaaugga

SEQ ID NO: 1190 - RNA, 19 nt, Artificial Sequence
  Synthetic oligonucleotide
ccauucagaaucuagugua

SEQ ID NO: 1191 - RNA, 19 nt, Artificial Sequence
  Synthetic oligonucleotide
uacacuagauucugaaugg

SEQ ID NO: 1192 - RNA, 19 nt, Artificial Sequence
  Synthetic oligonucleotide
cauucagaaucuaguguga

SEQ ID NO: 1193 - RNA, 19 nt, Artificial Sequence
  Synthetic oligonucleotide
ucacacuagauucugaaug

SEQ ID NO: 1194 - RNA, 19 nt, Artificial Sequence
  Synthetic oligonucleotide
auucagaaucuagugugua

SEQ ID NO: 1195 - RNA, 19 nt, Artificial Sequence
  Synthetic oligonucleotide
uacacacuagauucugaau

SEQ ID NO: 1196 - RNA, 19 nt, Artificial Sequence
  Synthetic oligonucleotide
uucagaaucuaguguguua

SEQ ID NO: 1197 - RNA, 19 nt, Artificial Sequence
  Synthetic oligonucleotide
uaacacacuagauucugaa

SEQ ID NO: 1198 - RNA, 19 nt, Artificial Sequence
  Synthetic oligonucleotide
agaaucuaguguguuugga

SEQ ID NO: 1199 - RNA, 19 nt, Artificial Sequence
  Synthetic oligonucleotide
uccaaacacacuagauucu

SEQ ID NO: 1200 - RNA, 19 nt, Artificial Sequence
  Synthetic oligonucleotide
gaaucuaguguguuuggua

SEQ ID NO: 1201 - RNA, 19 nt, Artificial Sequence
  Synthetic oligonucleotide
uaccaaacacacuagauuc

SEQ ID NO: 1202 - RNA, 19 nt, Artificial Sequence
  Synthetic oligonucleotide
aaucuaguguguuugguca

SEQ ID NO: 1203 - RNA, 19 nt, Artificial Sequence
  Synthetic oligonucleotide
ugaccaaacacacuagauu

SEQ ID NO: 1204 - RNA, 19 nt, Artificial Sequence
  Synthetic oligonucleotide
aucuaguguguuuggucaa

SEQ ID NO: 1205 - RNA, 19 nt, Artificial Sequence
  Synthetic oligonucleotide
uugaccaaacacacuagau

SEQ ID NO: 1206 - RNA, 19 nt, Artificial Sequence
  Synthetic oligonucleotide
cuaguguguuuggucagaa

SEQ ID NO: 1207 - RNA, 19 nt, Artificial Sequence
  Synthetic oligonucleotide
uucugaccaaacacacuag

SEQ ID NO: 1208 - RNA, 19 nt, Artificial Sequence
  Synthetic oligonucleotide
uguguuuggucagauagaa

SEQ ID NO: 1209 - RNA, 19 nt, Artificial Sequence
  Synthetic oligonucleotide
uucuaucugaccaaacaca

SEQ ID NO: 1210 - RNA, 19 nt, Artificial Sequence
  Synthetic oligonucleotide
guguuuggucagauagaaa

SEQ ID NO: 1211 - RNA, 19 nt, Artificial Sequence
  Synthetic oligonucleotide
uuucuaucugaccaaacac

SEQ ID NO: 1212 - RNA, 19 nt, Artificial Sequence
  Synthetic oligonucleotide
uguuuggucagauagaaaa

SEQ ID NO: 1213 - RNA, 19 nt, Artificial Sequence
  Synthetic oligonucleotide
uuuucuaucugaccaaaca

SEQ ID NO: 1214 - RNA, 19 nt, Artificial Sequence
  Synthetic oligonucleotide
uuuggucagauagaaaaua

SEQ ID NO: 1215 - RNA, 19 nt, Artificial Sequence
  Synthetic oligonucleotide
uauuuucuaucugaccaaa

SEQ ID NO: 1216 - RNA, 19 nt, Artificial Sequence
  Synthetic oligonucleotide
uuggucagauagaaaauca

SEQ ID NO: 1217 - RNA, 19 nt, Artificial Sequence
  Synthetic oligonucleotide
ugauuuucuaucugaccaa

SEQ ID NO: 1218 - RNA, 19 nt, Artificial Sequence
  Synthetic oligonucleotide
gucagauagaaaaucauca

SEQ ID NO: 1219 - RNA, 19 nt, Artificial Sequence
  Synthetic oligonucleotide
ugaugauuuucuaucugac

SEQ ID NO: 1220 - RNA, 19 nt, Artificial Sequence
  Synthetic oligonucleotide
cagauagaaaaucaucuaa

SEQ ID NO: 1221 - RNA, 19 nt, Artificial Sequence
  Synthetic oligonucleotide
uuagaugauuuucuaucug

SEQ ID NO: 1222 - RNA, 19 nt, Artificial Sequence
  Synthetic oligonucleotide
auagaaaaucaucuacgua

SEQ ID NO: 1223 - RNA, 19 nt, Artificial Sequence
  Synthetic oligonucleotide
uacguagaugauuuucuau

SEQ ID NO: 1224 - RNA, 19 nt, Artificial Sequence
  Synthetic oligonucleotide
uagaaaaucaucuacguaa

SEQ ID NO: 1225 - RNA, 19 nt, Artificial Sequence
  Synthetic oligonucleotide
uuacguagaugauuuucua

SEQ ID NO: 1226 - RNA, 19 nt, Artificial Sequence
  Synthetic oligonucleotide
agaaaaucaucuacguaaa

SEQ ID NO: 1227 - RNA, 19 nt, Artificial Sequence
  Synthetic oligonucleotide
uuuacguagaugauuuucu

SEQ ID NO: 1228 - RNA, 19 nt, Artificial Sequence
  Synthetic oligonucleotide
aaaaucaucuacguaaaua

SEQ ID NO: 1229 - RNA, 19 nt, Artificial Sequence
  Synthetic oligonucleotide
uauuuacguagaugauuuu

SEQ ID NO: 1230 - RNA, 19 nt, Artificial Sequence
  Synthetic oligonucleotide
aaucaucuacguaaauuga

SEQ ID NO: 1231 - RNA, 19 nt, Artificial Sequence
  Synthetic oligonucleotide
ucaauuuacguagaugauu

SEQ ID NO: 1232 - RNA, 19 nt, Artificial Sequence
  Synthetic oligonucleotide
aucaucuacguaaauugca

SEQ ID NO: 1233 - RNA, 19 nt, Artificial Sequence
  Synthetic oligonucleotide
ugcaauuuacguagaugau

SEQ ID NO: 1234 - RNA, 19 nt, Artificial Sequence
  Synthetic oligonucleotide
caucuacguaaauugccca

SEQ ID NO: 1235 - RNA, 19 nt, Artificial Sequence
  Synthetic oligonucleotide
ugggcaauuuacguagaug

SEQ ID NO: 1236 - RNA, 19 nt, Artificial Sequence
  Synthetic oligonucleotide
guaaauugcccgacauaga

SEQ ID NO: 1237 - RNA, 19 nt, Artificial Sequence
  Synthetic oligonucleotide
ucuaugucgggcaauuuac

SEQ ID NO: 1238 - RNA, 19 nt, Artificial Sequence
  Synthetic oligonucleotide
uaaauugcccgacauagaa

SEQ ID NO: 1239 - RNA, 19 nt, Artificial Sequence
  Synthetic oligonucleotide
uucuaugucgggcaauuua

SEQ ID NO: 1240 - RNA, 19 nt, Artificial Sequence
  Synthetic oligonucleotide
aaauugcccgacauagaga

SEQ ID NO: 1241 - RNA, 19 nt, Artificial Sequence
  Synthetic oligonucleotide
ucucuaugucgggcaauuu

SEQ ID NO: 1242 - RNA, 19 nt, Artificial Sequence
  Synthetic oligonucleotide
auugcccgacauagagaga

SEQ ID NO: 1243 - RNA, 19 nt, Artificial Sequence
  Synthetic oligonucleotide
ucucucuaugucgggcaau

SEQ ID NO: 1244 - RNA, 19 nt, Artificial Sequence
  Synthetic oligonucleotide
uugcccgacauagagagga

SEQ ID NO: 1245 - RNA, 19 nt, Artificial Sequence
  Synthetic oligonucleotide
uccucucuaugucgggcaa

SEQ ID NO: 1246 - RNA, 19 nt, Artificial Sequence
  Synthetic oligonucleotide
auagagaggggacucugua

SEQ ID NO: 1247 - RNA, 19 nt, Artificial Sequence
  Synthetic oligonucleotide
uacagaguccccucucuau

SEQ ID NO: 1248 - RNA, 19 nt, Artificial Sequence
  Synthetic oligonucleotide
agaggggacucuguagcaa

SEQ ID NO: 1249 - RNA, 19 nt, Artificial Sequence
  Synthetic oligonucleotide
uugcuacagaguccccucu

SEQ ID NO: 1250 - RNA, 19 nt, Artificial Sequence
  Synthetic oligonucleotide
ggacucuguagcauuuaua

SEQ ID NO: 1251 - RNA, 19 nt, Artificial Sequence
  Synthetic oligonucleotide
uauaaaugcuacagagucc

SEQ ID NO: 1252 - RNA, 19 nt, Artificial Sequence
  Synthetic oligonucleotide
gacucuguagcauuuauca

SEQ ID NO: 1253 - RNA, 19 nt, Artificial Sequence
  Synthetic oligonucleotide
ugauaaaugcuacagaguc

SEQ ID NO: 1254 - RNA, 19 nt, Artificial Sequence
  Synthetic oligonucleotide
cucuguagcauuuaucaca

SEQ ID NO: 1255 - RNA, 19 nt, Artificial Sequence
  Synthetic oligonucleotide
ugugauaaaugcuacagag

SEQ ID NO: 1256 - RNA, 19 nt, Artificial Sequence
  Synthetic oligonucleotide
aaaauguucuacccaagaa

SEQ ID NO: 1257 - RNA, 19 nt, Artificial Sequence
  Synthetic oligonucleotide
uucuuggguagaacauuuu

SEQ ID NO: 1258 - RNA, 19 nt, Artificial Sequence
  Synthetic oligonucleotide
aauguucuacccaagagua

SEQ ID NO: 1259 - RNA, 19 nt, Artificial Sequence
  Synthetic oligonucleotide
uacucuuggguagaacauu

SEQ ID NO: 1260 - RNA, 19 nt, Artificial Sequence
  Synthetic oligonucleotide
auguucuacccaagaguua

SEQ ID NO: 1261 - RNA, 19 nt, Artificial Sequence
  Synthetic oligonucleotide
uaacucuuggguagaacau

SEQ ID NO: 1262 - RNA, 19 nt, Artificial Sequence
  Synthetic oligonucleotide
uguucuacccaagaguuca

SEQ ID NO: 1263 - RNA, 19 nt, Artificial Sequence
  Synthetic oligonucleotide
ugaacucuuggguagaaca

SEQ ID NO: 1264 - RNA, 19 nt, Artificial Sequence
  Synthetic oligonucleotide
uucuacccaagaguucuua

SEQ ID NO: 1265 - RNA, 19 nt, Artificial Sequence
  Synthetic oligonucleotide
uaagaacucuuggguagaa

SEQ ID NO: 1266 - RNA, 19 nt, Artificial Sequence
  Synthetic oligonucleotide
ucuacccaagaguucuuca

SEQ ID NO: 1267 - RNA, 19 nt, Artificial Sequence
  Synthetic oligonucleotide
ugaagaacucuuggguaga

SEQ ID NO: 1268 - RNA, 19 nt, Artificial Sequence
  Synthetic oligonucleotide
uacccaagaguucuucuua

SEQ ID NO: 1269 - RNA, 19 nt, Artificial Sequence
  Synthetic oligonucleotide
uaagaagaacucuugggua

SEQ ID NO: 1270 - RNA, 19 nt, Artificial Sequence
  Synthetic oligonucleotide
acccaagaguucuucuuga

SEQ ID NO: 1271 - RNA, 19 nt, Artificial Sequence
  Synthetic oligonucleotide
ucaagaagaacucuugggu

SEQ ID NO: 1272 - RNA, 19 nt, Artificial Sequence
  Synthetic oligonucleotide
gaguucuucuugauuguca

SEQ ID NO: 1273 - RNA, 19 nt, Artificial Sequence
  Synthetic oligonucleotide
ugacaaucaagaagaacuc

SEQ ID NO: 1274 - RNA, 19 nt, Artificial Sequence
  Synthetic oligonucleotide
ucuugauugucaaaacuua

SEQ ID NO: 1275 - RNA, 19 nt, Artificial Sequence
  Synthetic oligonucleotide
uaaguuuugacaaucaaga

SEQ ID NO: 1276 - RNA, 19 nt, Artificial Sequence
  Synthetic oligonucleotide
uugauugucaaaacuuuaa

SEQ ID NO: 1277 - RNA, 19 nt, Artificial Sequence
  Synthetic oligonucleotide
uuaaaguuuugacaaucaa

SEQ ID NO: 1278 - RNA, 19 nt, Artificial Sequence
  Synthetic oligonucleotide
ugauugucaaaacuuuaua

SEQ ID NO: 1279 - RNA, 19 nt, Artificial Sequence
  Synthetic oligonucleotide
uauaaaguuuugacaauca

SEQ ID NO: 1280 - RNA, 19 nt, Artificial Sequence
  Synthetic oligonucleotide
uugucaaaacuuuauauca

SEQ ID NO: 1281 - RNA, 19 nt, Artificial Sequence
  Synthetic oligonucleotide
ugauauaaaguuuugacaa

SEQ ID NO: 1282 - RNA, 19 nt, Artificial Sequence
  Synthetic oligonucleotide
ugucaaaacuuuauaucaa

SEQ ID NO: 1283 - RNA, 19 nt, Artificial Sequence
  Synthetic oligonucleotide
uugauauaaaguuuugaca

SEQ ID NO: 1284 - RNA, 19 nt, Artificial Sequence
  Synthetic oligonucleotide
caaaacuuuauaucaccua

SEQ ID NO: 1285 - RNA, 19 nt, Artificial Sequence
  Synthetic oligonucleotide
uaggugauauaaaguuuug

SEQ ID NO: 1286 - RNA, 19 nt, Artificial Sequence
  Synthetic oligonucleotide
aaaacuuuauaucaccuaa

SEQ ID NO: 1287 - RNA, 19 nt, Artificial Sequence
  Synthetic oligonucleotide
uuaggugauauaaaguuuu

SEQ ID NO: 1288 - RNA, 19 nt, Artificial Sequence
  Synthetic oligonucleotide
aaacuuuauaucaccuaaa

SEQ ID NO: 1289 - RNA, 19 nt, Artificial Sequence
  Synthetic oligonucleotide
uuuaggugauauaaaguuu

SEQ ID NO: 1290 - RNA, 19 nt, Artificial Sequence
  Synthetic oligonucleotide
acuuuauaucaccuaaaga

SEQ ID NO: 1291 - RNA, 19 nt, Artificial Sequence
  Synthetic oligonucleotide
ucuuuaggugauauaaagu

SEQ ID NO: 1292 - RNA, 19 nt, Artificial Sequence
  Synthetic oligonucleotide
cuuuauaucaccuaaagua

SEQ ID NO: 1293 - RNA, 19 nt, Artificial Sequence
  Synthetic oligonucleotide
uacuuuaggugauauaaag

SEQ ID NO: 1294 - RNA, 19 nt, Artificial Sequence
  Synthetic oligonucleotide
uuauaucaccuaaagucaa

SEQ ID NO: 1295 - RNA, 19 nt, Artificial Sequence
  Synthetic oligonucleotide
uugacuuuaggugauauaa

SEQ ID NO: 1296 - RNA, 19 nt, Artificial Sequence
  Synthetic oligonucleotide
uauaucaccuaaagucaga

SEQ ID NO: 1297 - RNA, 19 nt, Artificial Sequence
  Synthetic oligonucleotide
ucugacuuuaggugauaua

SEQ ID NO: 1298 - RNA, 19 nt, Artificial Sequence
  Synthetic oligonucleotide
uaucaccuaaagucagaaa

SEQ ID NO: 1299 - RNA, 19 nt, Artificial Sequence
  Synthetic oligonucleotide
uuucugacuuuaggugaua

SEQ ID NO: 1300 - RNA, 19 nt, Artificial Sequence
  Synthetic oligonucleotide
aucaccuaaagucagaaua

SEQ ID NO: 1301 - RNA, 19 nt, Artificial Sequence
  Synthetic oligonucleotide
uauucugacuuuaggugau

SEQ ID NO: 1302 - RNA, 19 nt, Artificial Sequence
  Synthetic oligonucleotide
ucaccuaaagucagaauua

SEQ ID NO: 1303 - RNA, 19 nt, Artificial Sequence
  Synthetic oligonucleotide
uaauucugacuuuagguga

SEQ ID NO: 1304 - RNA, 19 nt, Artificial Sequence
  Synthetic oligonucleotide
gucagaauuucaagcaaua

SEQ ID NO: 1305 - RNA, 19 nt, Artificial Sequence
  Synthetic oligonucleotide
uauugcuugaaauucugac

SEQ ID NO: 1306 - RNA, 19 nt, Artificial Sequence
  Synthetic oligonucleotide
agaauuucaagcaauaaua

SEQ ID NO: 1307 - RNA, 19 nt, Artificial Sequence
  Synthetic oligonucleotide
uauuauugcuugaaauucu

SEQ ID NO: 1308 - RNA, 19 nt, Artificial Sequence
  Synthetic oligonucleotide
auuucaagcaauaauacca

SEQ ID NO: 1309 - RNA, 19 nt, Artificial Sequence
  Synthetic oligonucleotide
ugguauuauugcuugaaau

SEQ ID NO: 1310 - RNA, 19 nt, Artificial Sequence
  Synthetic oligonucleotide
uuucaagcaauaauaccua

SEQ ID NO: 1311 - RNA, 19 nt, Artificial Sequence
  Synthetic oligonucleotide
uagguauuauugcuugaaa

SEQ ID NO: 1312 - RNA, 19 nt, Artificial Sequence
  Synthetic oligonucleotide
ucaagcaauaauaccugca

SEQ ID NO: 1313 - RNA, 19 nt, Artificial Sequence
  Synthetic oligonucleotide
ugcagguauuauugcuuga

SEQ ID NO: 1314 - RNA, 19 nt, Artificial Sequence
  Synthetic oligonucleotide
gcaauaauaccugcuguua

SEQ ID NO: 1315 - RNA, 19 nt, Artificial Sequence
  Synthetic oligonucleotide
uaacagcagguauuauugc

SEQ ID NO: 1316 - RNA, 19 nt, Artificial Sequence
  Synthetic oligonucleotide
uaauaccugcuguuaauua

SEQ ID NO: 1317 - RNA, 19 nt, Artificial Sequence
  Synthetic oligonucleotide
uaauuaacagcagguauua

SEQ ID NO: 1318 - RNA, 19 nt, Artificial Sequence
  Synthetic oligonucleotide
auaccugcuguuaauucca

SEQ ID NO: 1319 - RNA, 19 nt, Artificial Sequence
  Synthetic oligonucleotide
uggaauuaacagcagguau

SEQ ID NO: 1320 - RNA, 19 nt, Artificial Sequence
  Synthetic oligonucleotide
ugcuguuaauucccacaua

SEQ ID NO: 1321 - RNA, 19 nt, Artificial Sequence
  Synthetic oligonucleotide
uaugugggaauuaacagca

SEQ ID NO: 1322 - RNA, 19 nt, Artificial Sequence
  Synthetic oligonucleotide
gcuguuaauucccacauua

SEQ ID NO: 1323 - RNA, 19 nt, Artificial Sequence
  Synthetic oligonucleotide
uaaugugggaauuaacagc

SEQ ID NO: 1324 - RNA, 19 nt, Artificial Sequence
  Synthetic oligonucleotide
cuguuaauucccacauuca

SEQ ID NO: 1325 - RNA, 19 nt, Artificial Sequence
  Synthetic oligonucleotide
ugaaugugggaauuaacag

SEQ ID NO: 1326 - RNA, 19 nt, Artificial Sequence
  Synthetic oligonucleotide
uguuaauucccacauucaa

SEQ ID NO: 1327 - RNA, 19 nt, Artificial Sequence
  Synthetic oligonucleotide
uugaaugugggaauuaaca

SEQ ID NO: 1328 - RNA, 19 nt, Artificial Sequence
  Synthetic oligonucleotide
uuaauucccacauucagua

SEQ ID NO: 1329 - RNA, 19 nt, Artificial Sequence
  Synthetic oligonucleotide
uacugaaugugggaauuaa

SEQ ID NO: 1330 - RNA, 19 nt, Artificial Sequence
  Synthetic oligonucleotide
uaauucccacauucaguca

SEQ ID NO: 1331 - RNA, 19 nt, Artificial Sequence
  Synthetic oligonucleotide
ugacugaaugugggaauua

SEQ ID NO: 1332 - RNA, 19 nt, Artificial Sequence
  Synthetic oligonucleotide
uucccacauucagucagaa

SEQ ID NO: 1333 - RNA, 19 nt, Artificial Sequence
  Synthetic oligonucleotide
uucugacugaaugugggaa

SEQ ID NO: 1334 - RNA, 19 nt, Artificial Sequence
  Synthetic oligonucleotide
ucccacauucagucagaca

SEQ ID NO: 1335 - RNA, 19 nt, Artificial Sequence
  Synthetic oligonucleotide
ugucugacugaauguggga

SEQ ID NO: 1336 - RNA, 19 nt, Artificial Sequence
  Synthetic oligonucleotide
cccacauucagucagacua

SEQ ID NO: 1337 - RNA, 19 nt, Artificial Sequence
  Synthetic oligonucleotide
uagucugacugaauguggg

SEQ ID NO: 1338 - RNA, 19 nt, Artificial Sequence
  Synthetic oligonucleotide
cacauucagucagacuuga

SEQ ID NO: 1339 - RNA, 19 nt, Artificial Sequence
  Synthetic oligonucleotide
ucaagucugacugaaugug

SEQ ID NO: 1340 - RNA, 19 nt, Artificial Sequence
  Synthetic oligonucleotide
acauucagucagacuugca

SEQ ID NO: 1341 - RNA, 19 nt, Artificial Sequence
  Synthetic oligonucleotide
ugcaagucugacugaaugu

SEQ ID NO: 1342 - RNA, 19 nt, Artificial Sequence
  Synthetic oligonucleotide
cauucagucagacuugcua

SEQ ID NO: 1343 - RNA, 19 nt, Artificial Sequence
  Synthetic oligonucleotide
uagcaagucugacugaaug

SEQ ID NO: 1344 - RNA, 19 nt, Artificial Sequence
  Synthetic oligonucleotide
auucagucagacuugcuca

SEQ ID NO: 1345 - RNA, 19 nt, Artificial Sequence
  Synthetic oligonucleotide
ugagcaagucugacugaau

SEQ ID NO: 1346 - RNA, 19 nt, Artificial Sequence
  Synthetic oligonucleotide
acuugcuccggaccguuaa

SEQ ID NO: 1347 - RNA, 19 nt, Artificial Sequence
  Synthetic oligonucleotide
uuaacgguccggagcaagu

SEQ ID NO: 1348 - RNA, 19 nt, Artificial Sequence
  Synthetic oligonucleotide
cuugcuccggaccguuaua

SEQ ID NO: 1349 - RNA, 19 nt, Artificial Sequence
  Synthetic oligonucleotide
uauaacgguccggagcaag

SEQ ID NO: 1350 - RNA, 19 nt, Artificial Sequence
  Synthetic oligonucleotide
uugcuccggaccguuauua

SEQ ID NO: 1351 - RNA, 19 nt, Artificial Sequence
  Synthetic oligonucleotide
uaauaacgguccggagcaa

SEQ ID NO: 1352 - RNA, 19 nt, Artificial Sequence
  Synthetic oligonucleotide
gcuccggaccguuauuuua

SEQ ID NO: 1353 - RNA, 19 nt, Artificial Sequence
  Synthetic oligonucleotide
uaaaauaacgguccggagc

SEQ ID NO: 1354 - RNA, 19 nt, Artificial Sequence
  Synthetic oligonucleotide
cuccggaccguuauuuuaa

SEQ ID NO: 1355 - RNA, 19 nt, Artificial Sequence
  Synthetic oligonucleotide
uuaaaauaacgguccggag

SEQ ID NO: 1356 - RNA, 19 nt, Artificial Sequence
  Synthetic oligonucleotide
uccggaccguuauuuuaga

SEQ ID NO: 1357 - RNA, 19 nt, Artificial Sequence
  Synthetic oligonucleotide
ucuaaaauaacgguccgga

SEQ ID NO: 1358 - RNA, 19 nt, Artificial Sequence
  Synthetic oligonucleotide
ggaccguuauuuuagaaaa

SEQ ID NO: 1359 - RNA, 19 nt, Artificial Sequence
  Synthetic oligonucleotide
uuuucuaaaauaacggucc

SEQ ID NO: 1360 - RNA, 19 nt, Artificial Sequence
  Synthetic oligonucleotide
gaccguuauuuuagaaaua

SEQ ID NO: 1361 - RNA, 19 nt, Artificial Sequence
  Synthetic oligonucleotide
uauuucuaaaauaacgguc

SEQ ID NO: 1362 - RNA, 19 nt, Artificial Sequence
  Synthetic oligonucleotide
accguuauuuuagaaauua

SEQ ID NO: 1363 - RNA, 19 nt, Artificial Sequence
  Synthetic oligonucleotide
uaauuucuaaaauaacggu

SEQ ID NO: 1364 - RNA, 19 nt, Artificial Sequence
  Synthetic oligonucleotide
ccguuauuuuagaaauuca

SEQ ID NO: 1365 - RNA, 19 nt, Artificial Sequence
  Synthetic oligonucleotide
ugaauuucuaaaauaacgg

SEQ ID NO: 1366 - RNA, 19 nt, Artificial Sequence
  Synthetic oligonucleotide
cguuauuuuagaaauucca

SEQ ID NO: 1367 - RNA, 19 nt, Artificial Sequence
  Synthetic oligonucleotide
uggaauuucuaaaauaacg

SEQ ID NO: 1368 - RNA, 19 nt, Artificial Sequence
  Synthetic oligonucleotide
uuuagaaauuccugaacua

SEQ ID NO: 1369 - RNA, 19 nt, Artificial Sequence
  Synthetic oligonucleotide
uaguucaggaauuucuaaa

SEQ ID NO: 1370 - RNA, 19 nt, Artificial Sequence
  Synthetic oligonucleotide
uuagaaauuccugaacuca

SEQ ID NO: 1371 - RNA, 19 nt, Artificial Sequence
  Synthetic oligonucleotide
ugaguucaggaauuucuaa

SEQ ID NO: 1372 - RNA, 19 nt, Artificial Sequence
  Synthetic oligonucleotide
gaaauuccugaacuccuca

SEQ ID NO: 1373 - RNA, 19 nt, Artificial Sequence
  Synthetic oligonucleotide
ugaggaguucaggaauuuc

SEQ ID NO: 1374 - RNA, 19 nt, Artificial Sequence
  Synthetic oligonucleotide
aaauuccugaacuccucaa

SEQ ID NO: 1375 - RNA, 19 nt, Artificial Sequence
  Synthetic oligonucleotide
uugaggaguucaggaauuu

SEQ ID NO: 1376 - RNA, 19 nt, Artificial Sequence
  Synthetic oligonucleotide
ccugaacuccucaguccaa

SEQ ID NO: 1377 - RNA, 19 nt, Artificial Sequence
  Synthetic oligonucleotide
uuggacugaggaguucagg

SEQ ID NO: 1378 - RNA, 19 nt, Artificial Sequence
  Synthetic oligonucleotide
ugaacuccucaguccagua

SEQ ID NO: 1379 - RNA, 19 nt, Artificial Sequence
  Synthetic oligonucleotide
uacuggacugaggaguuca

SEQ ID NO: 1380 - RNA, 19 nt, Artificial Sequence
  Synthetic oligonucleotide
cucaguccaguggagcaua

SEQ ID NO: 1381 - RNA, 19 nt, Artificial Sequence
  Synthetic oligonucleotide
uaugcuccacuggacugag

SEQ ID NO: 1382 - RNA, 19 nt, Artificial Sequence
  Synthetic oligonucleotide
ucaguccaguggagcauua

SEQ ID NO: 1383 - RNA, 19 nt, Artificial Sequence
  Synthetic oligonucleotide
uaaugcuccacuggacuga

SEQ ID NO: 1384 - RNA, 19 nt, Artificial Sequence
  Synthetic oligonucleotide
guccaguggagcauuacua

SEQ ID NO: 1385 - RNA, 19 nt, Artificial Sequence
  Synthetic oligonucleotide
uaguaaugcuccacuggac

SEQ ID NO: 1386 - RNA, 19 nt, Artificial Sequence
  Synthetic oligonucleotide
uccaguggagcauuacuua

SEQ ID NO: 1387 - RNA, 19 nt, Artificial Sequence
  Synthetic oligonucleotide
uaaguaaugcuccacugga

SEQ ID NO: 1388 - RNA, 19 nt, Artificial Sequence
  Synthetic oligonucleotide
aguggagcauuacuuaaaa

SEQ ID NO: 1389 - RNA, 19 nt, Artificial Sequence
  Synthetic oligonucleotide
uuuuaaguaaugcuccacu

SEQ ID NO: 1390 - RNA, 19 nt, Artificial Sequence
  Synthetic oligonucleotide
guggagcauuacuuaaaga

SEQ ID NO: 1391 - RNA, 19 nt, Artificial Sequence
  Synthetic oligonucleotide
ucuuuaaguaaugcuccac

SEQ ID NO: 1392 - RNA, 19 nt, Artificial Sequence
  Synthetic oligonucleotide
ggagcauuacuuaaagaua

SEQ ID NO: 1393 - RNA, 19 nt, Artificial Sequence
  Synthetic oligonucleotide
uaucuuuaaguaaugcucc

SEQ ID NO: 1394 - RNA, 19 nt, Artificial Sequence
  Synthetic oligonucleotide
gagcauuacuuaaagauaa

SEQ ID NO: 1395 - RNA, 19 nt, Artificial Sequence
  Synthetic oligonucleotide
uuaucuuuaaguaaugcuc

SEQ ID NO: 1396 - RNA, 19 nt, Artificial Sequence
  Synthetic oligonucleotide
agcauuacuuaaagauaca

SEQ ID NO: 1397 - RNA, 19 nt, Artificial Sequence
  Synthetic oligonucleotide
uguaucuuuaaguaaugcu

SEQ ID NO: 1398 - RNA, 19 nt, Artificial Sequence
  Synthetic oligonucleotide
cauuacuuaaagauacuca

SEQ ID NO: 1399 - RNA, 19 nt, Artificial Sequence
  Synthetic oligonucleotide
ugaguaucuuuaaguaaug

SEQ ID NO: 1400 - RNA, 19 nt, Artificial Sequence
  Synthetic oligonucleotide
uacuuaaagauacucaaua

SEQ ID NO: 1401 - RNA, 19 nt, Artificial Sequence
  Synthetic oligonucleotide
uauugaguaucuuuaagua

SEQ ID NO: 1402 - RNA, 19 nt, Artificial Sequence
  Synthetic oligonucleotide
cuuaaagauacucaaugaa

SEQ ID NO: 1403 - RNA, 19 nt, Artificial Sequence
  Synthetic oligonucleotide
uucauugaguaucuuuaag

SEQ ID NO: 1404 - RNA, 19 nt, Artificial Sequence
  Synthetic oligonucleotide
uuaaagauacucaaugaaa

SEQ ID NO: 1405 - RNA, 19 nt, Artificial Sequence
  Synthetic oligonucleotide
uuucauugaguaucuuuaa

SEQ ID NO: 1406 - RNA, 19 nt, Artificial Sequence
  Synthetic oligonucleotide
uaaagauacucaaugaaca

SEQ ID NO: 1407 - RNA, 19 nt, Artificial Sequence
  Synthetic oligonucleotide
uguucauugaguaucuuua

SEQ ID NO: 1408 - RNA, 19 nt, Artificial Sequence
  Synthetic oligonucleotide
gauacucaaugaacaagca

SEQ ID NO: 1409 - RNA, 19 nt, Artificial Sequence
  Synthetic oligonucleotide
ugcuuguucauugaguauc

SEQ ID NO: 1410 - RNA, 19 nt, Artificial Sequence
  Synthetic oligonucleotide
augaacaagcugccaaaga

SEQ ID NO: 1411 - RNA, 19 nt, Artificial Sequence
  Synthetic oligonucleotide
ucuuuggcagcuuguucau

SEQ ID NO: 1412 - RNA, 19 nt, Artificial Sequence
  Synthetic oligonucleotide
ugaacaagcugccaaagua

SEQ ID NO: 1413 - RNA, 19 nt, Artificial Sequence
  Synthetic oligonucleotide
uacuuuggcagcuuguuca

SEQ ID NO: 1414 - RNA, 19 nt, Artificial Sequence
  Synthetic oligonucleotide
gaacaagcugccaaaguua

SEQ ID NO: 1415 - RNA, 19 nt, Artificial Sequence
  Synthetic oligonucleotide
uaacuuuggcagcuuguuc

SEQ ID NO: 1416 - RNA, 19 nt, Artificial Sequence
  Synthetic oligonucleotide
acaagcugccaaaguugga

SEQ ID NO: 1417 - RNA, 19 nt, Artificial Sequence
  Synthetic oligonucleotide
uccaacuuuggcagcuugu

SEQ ID NO: 1418 - RNA, 19 nt, Artificial Sequence
  Synthetic oligonucleotide
cugccaaaguuggggauaa

SEQ ID NO: 1419 - RNA, 19 nt, Artificial Sequence
  Synthetic oligonucleotide
uuauccccaacuuuggcag

SEQ ID NO: 1420 - RNA, 19 nt, Artificial Sequence
  Synthetic oligonucleotide
ugccaaaguuggggauaaa

SEQ ID NO: 1421 - RNA, 19 nt, Artificial Sequence
  Synthetic oligonucleotide
uuuauccccaacuuuggca

SEQ ID NO: 1422 - RNA, 19 nt, Artificial Sequence
  Synthetic oligonucleotide
aaguuggggauaaaacuga

SEQ ID NO: 1423 - RNA, 19 nt, Artificial Sequence
  Synthetic oligonucleotide
ucaguuuuauccccaacuu

SEQ ID NO: 1424 - RNA, 19 nt, Artificial Sequence
  Synthetic oligonucleotide
guuggggauaaaacugaaa

SEQ ID NO: 1425 - RNA, 19 nt, Artificial Sequence
  Synthetic oligonucleotide
uuucaguuuuauccccaac

SEQ ID NO: 1426 - RNA, 19 nt, Artificial Sequence
  Synthetic oligonucleotide
uuggggauaaaacugaaua

SEQ ID NO: 1427 - RNA, 19 nt, Artificial Sequence
  Synthetic oligonucleotide
uauucaguuuuauccccaa

SEQ ID NO: 1428 - RNA, 19 nt, Artificial Sequence
  Synthetic oligonucleotide
ggggauaaaacugaauuaa

SEQ ID NO: 1429 - RNA, 19 nt, Artificial Sequence
  Synthetic oligonucleotide
uuaauucaguuuuaucccc

SEQ ID NO: 1430 - RNA, 19 nt, Artificial Sequence
  Synthetic oligonucleotide
gggauaaaacugaauuaua

SEQ ID NO: 1431 - RNA, 19 nt, Artificial Sequence
  Synthetic oligonucleotide
uauaauucaguuuuauccc

SEQ ID NO: 1432 - RNA, 19 nt, Artificial Sequence
  Synthetic oligonucleotide
ggauaaaacugaauuauua

SEQ ID NO: 1433 - RNA, 19 nt, Artificial Sequence
  Synthetic oligonucleotide
uaauaauucaguuuuaucc

SEQ ID NO: 1434 - RNA, 19 nt, Artificial Sequence
  Synthetic oligonucleotide
cugaauuauuuaaagacca

SEQ ID NO: 1435 - RNA, 19 nt, Artificial Sequence
  Synthetic oligonucleotide
uggucuuuaaauaauucag

SEQ ID NO: 1436 - RNA, 19 nt, Artificial Sequence
  Synthetic oligonucleotide
uauuuaaagaccuuucuga

SEQ ID NO: 1437 - RNA, 19 nt, Artificial Sequence
  Synthetic oligonucleotide
ucagaaaggucuuuaaaua

SEQ ID NO: 1438 - RNA, 19 nt, Artificial Sequence
  Synthetic oligonucleotide
auuuaaagaccuuucugaa

SEQ ID NO: 1439 - RNA, 19 nt, Artificial Sequence
  Synthetic oligonucleotide
uucagaaaggucuuuaaau

SEQ ID NO: 1440 - RNA, 19 nt, Artificial Sequence
  Synthetic oligonucleotide
uaaagaccuuucugacuua

SEQ ID NO: 1441 - RNA, 19 nt, Artificial Sequence
  Synthetic oligonucleotide
uaagucagaaaggucuuua

SEQ ID NO: 1442 - RNA, 19 nt, Artificial Sequence
  Synthetic oligonucleotide
aagaccuuucugacuucca

SEQ ID NO: 1443 - RNA, 19 nt, Artificial Sequence
  Synthetic oligonucleotide
uggaagucagaaaggucuu

SEQ ID NO: 1444 - RNA, 19 nt, Artificial Sequence
  Synthetic oligonucleotide
gaccuuucugacuucccua

SEQ ID NO: 1445 - RNA, 19 nt, Artificial Sequence
  Synthetic oligonucleotide
uagggaagucagaaagguc

SEQ ID NO: 1446 - RNA, 19 nt, Artificial Sequence
  Synthetic oligonucleotide
accuuucugacuucccuua

SEQ ID NO: 1447 - RNA, 19 nt, Artificial Sequence
  Synthetic oligonucleotide
uaagggaagucagaaaggu

SEQ ID NO: 1448 - RNA, 19 nt, Artificial Sequence
  Synthetic oligonucleotide
uucugacuucccuuuaaua

SEQ ID NO: 1449 - RNA, 19 nt, Artificial Sequence
  Synthetic oligonucleotide
uauuaaagggaagucagaa

SEQ ID NO: 1450 - RNA, 19 nt, Artificial Sequence
  Synthetic oligonucleotide
ucugacuucccuuuaauaa

SEQ ID NO: 1451 - RNA, 19 nt, Artificial Sequence
  Synthetic oligonucleotide
uuauuaaagggaagucaga

SEQ ID NO: 1452 - RNA, 19 nt, Artificial Sequence
  Synthetic oligonucleotide
ugacuucccuuuaauaaaa

SEQ ID NO: 1453 - RNA, 19 nt, Artificial Sequence
  Synthetic oligonucleotide
uuuuauuaaagggaaguca

SEQ ID NO: 1454 - RNA, 19 nt, Artificial Sequence
  Synthetic oligonucleotide
agaggaaggaugaaauuca

SEQ ID NO: 1455 - RNA, 19 nt, Artificial Sequence
  Synthetic oligonucleotide
ugaauuucauccuuccucu

SEQ ID NO: 1456 - RNA, 19 nt, Artificial Sequence
  Synthetic oligonucleotide
ggaugaaauucaaggugua

SEQ ID NO: 1457 - RNA, 19 nt, Artificial Sequence
  Synthetic oligonucleotide
uacaccuugaauuucaucc

SEQ ID NO: 1458 - RNA, 19 nt, Artificial Sequence
  Synthetic oligonucleotide
ugaaauucaagguguuaua

SEQ ID NO: 1459 - RNA, 19 nt, Artificial Sequence
  Synthetic oligonucleotide
uauaacaccuugaauuuca

SEQ ID NO: 1460 - RNA, 19 nt, Artificial Sequence
  Synthetic oligonucleotide
gaaauucaagguguuauua

SEQ ID NO: 1461 - RNA, 19 nt, Artificial Sequence
  Synthetic oligonucleotide
uaauaacaccuugaauuuc

SEQ ID NO: 1462 - RNA, 19 nt, Artificial Sequence
  Synthetic oligonucleotide
aauucaagguguuauugaa

SEQ ID NO: 1463 - RNA, 19 nt, Artificial Sequence
  Synthetic oligonucleotide
uucaauaacaccuugaauu

SEQ ID NO: 1464 - RNA, 19 nt, Artificial Sequence
  Synthetic oligonucleotide
auucaagguguuauugaca

SEQ ID NO: 1465 - RNA, 19 nt, Artificial Sequence
  Synthetic oligonucleotide
ugucaauaacaccuugaau

SEQ ID NO: 1466 - RNA, 19 nt, Artificial Sequence
  Synthetic oligonucleotide
uucaagguguuauugacga

SEQ ID NO: 1467 - RNA, 19 nt, Artificial Sequence
  Synthetic oligonucleotide
ucgucaauaacaccuugaa

SEQ ID NO: 1468 - RNA, 19 nt, Artificial Sequence
  Synthetic oligonucleotide
caagguguuauugacgaga

SEQ ID NO: 1469 - RNA, 19 nt, Artificial Sequence
  Synthetic oligonucleotide
ucucgucaauaacaccuug

SEQ ID NO: 1470 - RNA, 19 nt, Artificial Sequence
  Synthetic oligonucleotide
aagguguuauugacgagaa

SEQ ID NO: 1471 - RNA, 19 nt, Artificial Sequence
  Synthetic oligonucleotide
uucucgucaauaacaccuu

SEQ ID NO: 1472 - RNA, 19 nt, Artificial Sequence
  Synthetic oligonucleotide
gguguuauugacgagauca

SEQ ID NO: 1473 - RNA, 19 nt, Artificial Sequence
  Synthetic oligonucleotide
ugaucucgucaauaacacc

SEQ ID NO: 1474 - RNA, 19 nt, Artificial Sequence
  Synthetic oligonucleotide
guuauugacgagauccgaa

SEQ ID NO: 1475 - RNA, 19 nt, Artificial Sequence
  Synthetic oligonucleotide
uucggaucucgucaauaac

SEQ ID NO: 1476 - RNA, 19 nt, Artificial Sequence
  Synthetic oligonucleotide
uuauugacgagauccgaaa

SEQ ID NO: 1477 - RNA, 19 nt, Artificial Sequence
  Synthetic oligonucleotide
uuucggaucucgucaauaa

SEQ ID NO: 1478 - RNA, 19 nt, Artificial Sequence
  Synthetic oligonucleotide
uauugacgagauccgaaua

SEQ ID NO: 1479 - RNA, 19 nt, Artificial Sequence
  Synthetic oligonucleotide
uauucggaucucgucaaua

SEQ ID NO: 1480 - RNA, 19 nt, Artificial Sequence
  Synthetic oligonucleotide
auugacgagauccgaauga

SEQ ID NO: 1481 - RNA, 19 nt, Artificial Sequence
  Synthetic oligonucleotide
ucauucggaucucgucaau

SEQ ID NO: 1482 - RNA, 19 nt, Artificial Sequence
  Synthetic oligonucleotide
ugacgagauccgaaugcaa

SEQ ID NO: 1483 - RNA, 19 nt, Artificial Sequence
  Synthetic oligonucleotide
uugcauucggaucucguca

SEQ ID NO: 1484 - RNA, 19 nt, Artificial Sequence
  Synthetic oligonucleotide
gacgagauccgaaugcaua

SEQ ID NO: 1485 - RNA, 19 nt, Artificial Sequence
  Synthetic oligonucleotide
uaugcauucggaucucguc

SEQ ID NO: 1486 - RNA, 19 nt, Artificial Sequence
  Synthetic oligonucleotide
acgagauccgaaugcauua

SEQ ID NO: 1487 - RNA, 19 nt, Artificial Sequence
  Synthetic oligonucleotide
uaaugcauucggaucucgu

SEQ ID NO: 1488 - RNA, 19 nt, Artificial Sequence
  Synthetic oligonucleotide
cgagauccgaaugcauuua

SEQ ID NO: 1489 - RNA, 19 nt, Artificial Sequence
  Synthetic oligonucleotide
uaaaugcauucggaucucg

SEQ ID NO: 1490 - RNA, 19 nt, Artificial Sequence
  Synthetic oligonucleotide
gagauccgaaugcauuuga

SEQ ID NO: 1491 - RNA, 19 nt, Artificial Sequence
  Synthetic oligonucleotide
ucaaaugcauucggaucuc

SEQ ID NO: 1492 - RNA, 19 nt, Artificial Sequence
  Synthetic oligonucleotide
agauccgaaugcauuugca

SEQ ID NO: 1493 - RNA, 19 nt, Artificial Sequence
  Synthetic oligonucleotide
ugcaaaugcauucggaucu

SEQ ID NO: 1494 - RNA, 19 nt, Artificial Sequence
  Synthetic oligonucleotide
gauccgaaugcauuugcaa

SEQ ID NO: 1495 - RNA, 19 nt, Artificial Sequence
  Synthetic oligonucleotide
uugcaaaugcauucggauc

SEQ ID NO: 1496 - RNA, 19 nt, Artificial Sequence
  Synthetic oligonucleotide
uccgaaugcauuugcaaga

SEQ ID NO: 1497 - RNA, 19 nt, Artificial Sequence
  Synthetic oligonucleotide
ucuugcaaaugcauucgga

SEQ ID NO: 1498 - RNA, 19 nt, Artificial Sequence
  Synthetic oligonucleotide
ccgaaugcauuugcaagaa

SEQ ID NO: 1499 - RNA, 19 nt, Artificial Sequence
  Synthetic oligonucleotide
uucuugcaaaugcauucgg

SEQ ID NO: 1500 - RNA, 19 nt, Artificial Sequence
  Synthetic oligonucleotide
gcauuugcaagaaauacga

SEQ ID NO: 1501 - RNA, 19 nt, Artificial Sequence
  Synthetic oligonucleotide
ucguauuucuugcaaaugc

SEQ ID NO: 1502 - RNA, 19 nt, Artificial Sequence
  Synthetic oligonucleotide
aaaauccuucugcacaaua

SEQ ID NO: 1503 - RNA, 19 nt, Artificial Sequence
  Synthetic oligonucleotide
uauugugcagaaggauuuu

SEQ ID NO: 1504 - RNA, 19 nt, Artificial Sequence
  Synthetic oligonucleotide
aaauccuucugcacaauaa

SEQ ID NO: 1505 - RNA, 19 nt, Artificial Sequence
  Synthetic oligonucleotide
uuauugugcagaaggauuu

SEQ ID NO: 1506 - RNA, 19 nt, Artificial Sequence
  Synthetic oligonucleotide
auccuucugcacaauauga

SEQ ID NO: 1507 - RNA, 19 nt, Artificial Sequence
  Synthetic oligonucleotide
ucauauugugcagaaggau

SEQ ID NO: 1508 - RNA, 19 nt, Artificial Sequence
  Synthetic oligonucleotide
cuucugcacaauaugugaa

SEQ ID NO: 1509 - RNA, 19 nt, Artificial Sequence
  Synthetic oligonucleotide
uucacauauugugcagaag

SEQ ID NO: 1510 - RNA, 19 nt, Artificial Sequence
  Synthetic oligonucleotide
ucugcacaauaugugacaa

SEQ ID NO: 1511 - RNA, 19 nt, Artificial Sequence
  Synthetic oligonucleotide
uugucacauauugugcaga

SEQ ID NO: 1512 - RNA, 19 nt, Artificial Sequence
  Synthetic oligonucleotide
ugcacaauaugugacagua

SEQ ID NO: 1513 - RNA, 19 nt, Artificial Sequence
  Synthetic oligonucleotide
uacugucacauauugugca

SEQ ID NO: 1514 - RNA, 19 nt, Artificial Sequence
  Synthetic oligonucleotide
gcacaauaugugacaguaa

SEQ ID NO: 1515 - RNA, 19 nt, Artificial Sequence
  Synthetic oligonucleotide
uuacugucacauauugugc

SEQ ID NO: 1516 - RNA, 19 nt, Artificial Sequence
  Synthetic oligonucleotide
uaugugacaguaucaggaa

SEQ ID NO: 1517 - RNA, 19 nt, Artificial Sequence
  Synthetic oligonucleotide
uuccugauacugucacaua

SEQ ID NO: 1518 - RNA, 19 nt, Artificial Sequence
  Synthetic oligonucleotide
augugacaguaucaggaca

SEQ ID NO: 1519 - RNA, 19 nt, Artificial Sequence
  Synthetic oligonucleotide
uguccugauacugucacau

SEQ ID NO: 1520 - RNA, 19 nt, Artificial Sequence
  Synthetic oligonucleotide
guaucaggacaggaguuua

SEQ ID NO: 1521 - RNA, 19 nt, Artificial Sequence
  Synthetic oligonucleotide
uaaacuccuguccugauac

SEQ ID NO: 1522 - RNA, 19 nt, Artificial Sequence
  Synthetic oligonucleotide
uaucaggacaggaguuuaa

SEQ ID NO: 1523 - RNA, 19 nt, Artificial Sequence
  Synthetic oligonucleotide
uuaaacuccuguccugaua

SEQ ID NO: 1524 - RNA, 19 nt, Artificial Sequence
  Synthetic oligonucleotide
caggacaggaguuuaugaa

SEQ ID NO: 1525 - RNA, 19 nt, Artificial Sequence
  Synthetic oligonucleotide
uucauaaacuccuguccug

SEQ ID NO: 1526 - RNA, 19 nt, Artificial Sequence
  Synthetic oligonucleotide
aggacaggaguuuaugaua

SEQ ID NO: 1527 - RNA, 19 nt, Artificial Sequence
  Synthetic oligonucleotide
uaucauaaacuccuguccu

SEQ ID NO: 1528 - RNA, 19 nt, Artificial Sequence
  Synthetic oligonucleotide
ggacaggaguuuaugauaa

SEQ ID NO: 1529 - RNA, 19 nt, Artificial Sequence
  Synthetic oligonucleotide
uuaucauaaacuccugucc

SEQ ID NO: 1530 - RNA, 19 nt, Artificial Sequence
  Synthetic oligonucleotide
uuaugauagaaauaaagaa

SEQ ID NO: 1531 - RNA, 19 nt, Artificial Sequence
  Synthetic oligonucleotide
uucuuuauuucuaucauaa

SEQ ID NO: 1532 - RNA, 19 nt, Artificial Sequence
  Synthetic oligonucleotide
gaaauaaagaacucugcua

SEQ ID NO: 1533 - RNA, 19 nt, Artificial Sequence
  Synthetic oligonucleotide
uagcagaguucuuuauuuc

SEQ ID NO: 1534 - RNA, 19 nt, Artificial Sequence
  Synthetic oligonucleotide
aauaaagaacucugcugua

SEQ ID NO: 1535 - RNA, 19 nt, Artificial Sequence
  Synthetic oligonucleotide
uacagcagaguucuuuauu

SEQ ID NO: 1536 - RNA, 19 nt, Artificial Sequence
  Synthetic oligonucleotide
auaaagaacucugcuguaa

SEQ ID NO: 1537 - RNA, 19 nt, Artificial Sequence
  Synthetic oligonucleotide
uuacagcagaguucuuuau

SEQ ID NO: 1538 - RNA, 19 nt, Artificial Sequence
  Synthetic oligonucleotide
uaaagaacucugcuguaua

SEQ ID NO: 1539 - RNA, 19 nt, Artificial Sequence
  Synthetic oligonucleotide
uauacagcagaguucuuua

SEQ ID NO: 1540 - RNA, 19 nt, Artificial Sequence
  Synthetic oligonucleotide
agaacucugcuguaucuua

SEQ ID NO: 1541 - RNA, 19 nt, Artificial Sequence
  Synthetic oligonucleotide
uaagauacagcagaguucu

SEQ ID NO: 1542 - RNA, 19 nt, Artificial Sequence
  Synthetic oligonucleotide
gaacucugcuguaucuuga

SEQ ID NO: 1543 - RNA, 19 nt, Artificial Sequence
  Synthetic oligonucleotide
ucaagauacagcagaguuc

SEQ ID NO: 1544 - RNA, 19 nt, Artificial Sequence
  Synthetic oligonucleotide
acucugcuguaucuuguaa

SEQ ID NO: 1545 - RNA, 19 nt, Artificial Sequence
  Synthetic oligonucleotide
uuacaagauacagcagagu

SEQ ID NO: 1546 - RNA, 19 nt, Artificial Sequence
  Synthetic oligonucleotide
cucugcuguaucuuguaua

SEQ ID NO: 1547 - RNA, 19 nt, Artificial Sequence
  Synthetic oligonucleotide
uauacaagauacagcagag

SEQ ID NO: 1548 - RNA, 19 nt, Artificial Sequence
  Synthetic oligonucleotide
ugcuguaucuuguauacca

SEQ ID NO: 1549 - RNA, 19 nt, Artificial Sequence
  Synthetic oligonucleotide
ugguauacaagauacagca

SEQ ID NO: 1550 - RNA, 19 nt, Artificial Sequence
  Synthetic oligonucleotide
gcuguaucuuguauaccaa

SEQ ID NO: 1551 - RNA, 19 nt, Artificial Sequence
  Synthetic oligonucleotide
uugguauacaagauacagc

SEQ ID NO: 1552 - RNA, 19 nt, Artificial Sequence
  Synthetic oligonucleotide
guaucuuguauaccaacua

SEQ ID NO: 1553 - RNA, 19 nt, Artificial Sequence
  Synthetic oligonucleotide
uaguugguauacaagauac

SEQ ID NO: 1554 - RNA, 19 nt, Artificial Sequence
  Synthetic oligonucleotide
uaucuuguauaccaacuga

SEQ ID NO: 1555 - RNA, 19 nt, Artificial Sequence
  Synthetic oligonucleotide
ucaguugguauacaagaua

SEQ ID NO: 1556 - RNA, 19 nt, Artificial Sequence
  Synthetic oligonucleotide
ucuuguauaccaacugaua

SEQ ID NO: 1557 - RNA, 19 nt, Artificial Sequence
  Synthetic oligonucleotide
uaucaguugguauacaaga

SEQ ID NO: 1558 - RNA, 19 nt, Artificial Sequence
  Synthetic oligonucleotide
uguauaccaacugauugga

SEQ ID NO: 1559 - RNA, 19 nt, Artificial Sequence
  Synthetic oligonucleotide
uccaaucaguugguauaca

SEQ ID NO: 1560 - RNA, 19 nt, Artificial Sequence
  Synthetic oligonucleotide
uauaccaacugauugggua

SEQ ID NO: 1561 - RNA, 19 nt, Artificial Sequence
  Synthetic oligonucleotide
uacccaaucaguugguaua

SEQ ID NO: 1562 - RNA, 19 nt, Artificial Sequence
  Synthetic oligonucleotide
auaccaacugauuggguaa

SEQ ID NO: 1563 - RNA, 19 nt, Artificial Sequence
  Synthetic oligonucleotide
uuacccaaucaguugguau

SEQ ID NO: 1564 - RNA, 19 nt, Artificial Sequence
  Synthetic oligonucleotide
accaacugauuggguaaaa

SEQ ID NO: 1565 - RNA, 19 nt, Artificial Sequence
  Synthetic oligonucleotide
uuuuacccaaucaguuggu

SEQ ID NO: 1566 - RNA, 19 nt, Artificial Sequence
  Synthetic oligonucleotide
ccaacugauuggguaaaga

SEQ ID NO: 1567 - RNA, 19 nt, Artificial Sequence
  Synthetic oligonucleotide
ucuuuacccaaucaguugg

SEQ ID NO: 1568 - RNA, 19 nt, Artificial Sequence
  Synthetic oligonucleotide
caacugauuggguaaagga

SEQ ID NO: 1569 - RNA, 19 nt, Artificial Sequence
  Synthetic oligonucleotide
uccuuuacccaaucaguug

SEQ ID NO: 1570 - RNA, 19 nt, Artificial Sequence
  Synthetic oligonucleotide
aacugauuggguaaaggua

SEQ ID NO: 1571 - RNA, 19 nt, Artificial Sequence
  Synthetic oligonucleotide
uaccuuuacccaaucaguu

SEQ ID NO: 1572 - RNA, 19 nt, Artificial Sequence
  Synthetic oligonucleotide
cugauuggguaaagguuga

SEQ ID NO: 1573 - RNA, 19 nt, Artificial Sequence
  Synthetic oligonucleotide
ucaaccuuuacccaaucag

SEQ ID NO: 1574 - RNA, 19 nt, Artificial Sequence
  Synthetic oligonucleotide
ugauuggguaaagguugga

SEQ ID NO: 1575 - RNA, 19 nt, Artificial Sequence
  Synthetic oligonucleotide
uccaaccuuuacccaauca

SEQ ID NO: 1576 - RNA, 19 nt, Artificial Sequence
  Synthetic oligonucleotide
gauuggguaaagguuggaa

SEQ ID NO: 1577 - RNA, 19 nt, Artificial Sequence
  Synthetic oligonucleotide
uuccaaccuuuacccaauc

SEQ ID NO: 1578 - RNA, 19 nt, Artificial Sequence
  Synthetic oligonucleotide
auuggguaaagguuggaaa

SEQ ID NO: 1579 - RNA, 19 nt, Artificial Sequence
  Synthetic oligonucleotide
uuuccaaccuuuacccaau

SEQ ID NO: 1580 - RNA, 19 nt, Artificial Sequence
  Synthetic oligonucleotide
uggguaaagguuggaagca

SEQ ID NO: 1581 - RNA, 19 nt, Artificial Sequence
  Synthetic oligonucleotide
ugcuuccaaccuuuaccca

SEQ ID NO: 1582 - RNA, 19 nt, Artificial Sequence
  Synthetic oligonucleotide
guaaagguuggaagcacaa

SEQ ID NO: 1583 - RNA, 19 nt, Artificial Sequence
  Synthetic oligonucleotide
uugugcuuccaaccuuuac

SEQ ID NO: 1584 - RNA, 19 nt, Artificial Sequence
  Synthetic oligonucleotide
guuggaagcacaaaagcua

SEQ ID NO: 1585 - RNA, 19 nt, Artificial Sequence
  Synthetic oligonucleotide
uagcuuuugugcuuccaac

SEQ ID NO: 1586 - RNA, 19 nt, Artificial Sequence
  Synthetic oligonucleotide
uuggaagcacaaaagcuga

SEQ ID NO: 1587 - RNA, 19 nt, Artificial Sequence
  Synthetic oligonucleotide
ucagcuuuugugcuuccaa

SEQ ID NO: 1588 - RNA, 19 nt, Artificial Sequence
  Synthetic oligonucleotide
uggaagcacaaaagcugua

SEQ ID NO: 1589 - RNA, 19 nt, Artificial Sequence
  Synthetic oligonucleotide
uacagcuuuugugcuucca

SEQ ID NO: 1590 - RNA, 19 nt, Artificial Sequence
  Synthetic oligonucleotide
ggaagcacaaaagcuguga

SEQ ID NO: 1591 - RNA, 19 nt, Artificial Sequence
  Synthetic oligonucleotide
ucacagcuuuugugcuucc

SEQ ID NO: 1592 - RNA, 19 nt, Artificial Sequence
  Synthetic oligonucleotide
gaagcacaaaagcugugaa

SEQ ID NO: 1593 - RNA, 19 nt, Artificial Sequence
  Synthetic oligonucleotide
uucacagcuuuugugcuuc

SEQ ID NO: 1594 - RNA, 19 nt, Artificial Sequence
  Synthetic oligonucleotide
agcugugagccgcuuucaa

SEQ ID NO: 1595 - RNA, 19 nt, Artificial Sequence
  Synthetic oligonucleotide
uugaaagcggcucacagcu

SEQ ID NO: 1596 - RNA, 19 nt, Artificial Sequence
  Synthetic oligonucleotide
ugugagccgcuuucacuca

SEQ ID NO: 1597 - RNA, 19 nt, Artificial Sequence
  Synthetic oligonucleotide
ugagugaaagcggcucaca

SEQ ID NO: 1598 - RNA, 19 nt, Artificial Sequence
  Synthetic oligonucleotide
gugagccgcuuucacucua

SEQ ID NO: 1599 - RNA, 19 nt, Artificial Sequence
  Synthetic oligonucleotide
uagagugaaagcggcucac

SEQ ID NO: 1600 - RNA, 19 nt, Artificial Sequence
  Synthetic oligonucleotide
agccgcuuucacucuccua

SEQ ID NO: 1601 - RNA, 19 nt, Artificial Sequence
  Synthetic oligonucleotide
uaggagagugaaagcggcu

SEQ ID NO: 1602 - RNA, 19 nt, Artificial Sequence
  Synthetic oligonucleotide
gccgcuuucacucuccuua

SEQ ID NO: 1603 - RNA, 19 nt, Artificial Sequence
  Synthetic oligonucleotide
uaaggagagugaaagcggc

SEQ ID NO: 1604 - RNA, 19 nt, Artificial Sequence
  Synthetic oligonucleotide
gcuuucacucuccuuuuaa

SEQ ID NO: 1605 - RNA, 19 nt, Artificial Sequence
  Synthetic oligonucleotide
uuaaaaggagagugaaagc

SEQ ID NO: 1606 - RNA, 19 nt, Artificial Sequence
  Synthetic oligonucleotide
cuuucacucuccuuuuaua

SEQ ID NO: 1607 - RNA, 19 nt, Artificial Sequence
  Synthetic oligonucleotide
uauaaaaggagagugaaag

SEQ ID NO: 1608 - RNA, 19 nt, Artificial Sequence
  Synthetic oligonucleotide
uuucacucuccuuuuauua

SEQ ID NO: 1609 - RNA, 19 nt, Artificial Sequence
  Synthetic oligonucleotide
uaauaaaaggagagugaaa

SEQ ID NO: 1610 - RNA, 19 nt, Artificial Sequence
  Synthetic oligonucleotide
cacucuccuuuuauuguaa

SEQ ID NO: 1611 - RNA, 19 nt, Artificial Sequence
  Synthetic oligonucleotide
uuacaauaaaaggagagug

SEQ ID NO: 1612 - RNA, 19 nt, Artificial Sequence
  Synthetic oligonucleotide
acucuccuuuuauuguaga

SEQ ID NO: 1613 - RNA, 19 nt, Artificial Sequence
  Synthetic oligonucleotide
ucuacaauaaaaggagagu

SEQ ID NO: 1614 - RNA, 19 nt, Artificial Sequence
  Synthetic oligonucleotide
cuuuuauuguagaaaauua

SEQ ID NO: 1615 - RNA, 19 nt, Artificial Sequence
  Synthetic oligonucleotide
uaauuuucuacaauaaaag

SEQ ID NO: 1616 - RNA, 19 nt, Artificial Sequence
  Synthetic oligonucleotide
uuuauuguagaaaauuaca

SEQ ID NO: 1617 - RNA, 19 nt, Artificial Sequence
  Synthetic oligonucleotide
uguaauuuucuacaauaaa

SEQ ID NO: 1618 - RNA, 19 nt, Artificial Sequence
  Synthetic oligonucleotide
auuguagaaaauuacagaa

SEQ ID NO: 1619 - RNA, 19 nt, Artificial Sequence
  Synthetic oligonucleotide
uucuguaauuuucuacaau

SEQ ID NO: 1620 - RNA, 19 nt, Artificial Sequence
  Synthetic oligonucleotide
guagaaaauuacagacaua

SEQ ID NO: 1621 - RNA, 19 nt, Artificial Sequence
  Synthetic oligonucleotide
uaugucuguaauuuucuac

SEQ ID NO: 1622 - RNA, 19 nt, Artificial Sequence
  Synthetic oligonucleotide
agaaaauuacagacaucua

SEQ ID NO: 1623 - RNA, 19 nt, Artificial Sequence
  Synthetic oligonucleotide
uagaugucuguaauuuucu

SEQ ID NO: 1624 - RNA, 19 nt, Artificial Sequence
  Synthetic oligonucleotide
gaaaauuacagacaucuga

SEQ ID NO: 1625 - RNA, 19 nt, Artificial Sequence
  Synthetic oligonucleotide
ucagaugucuguaauuuuc

SEQ ID NO: 1626 - RNA, 19 nt, Artificial Sequence
  Synthetic oligonucleotide
uuacagacaucugaaucaa

SEQ ID NO: 1627 - RNA, 19 nt, Artificial Sequence
  Synthetic oligonucleotide
uugauucagaugucuguaa

SEQ ID NO: 1628 - RNA, 19 nt, Artificial Sequence
  Synthetic oligonucleotide
agacaucugaaucagcuca

SEQ ID NO: 1629 - RNA, 19 nt, Artificial Sequence
  Synthetic oligonucleotide
ugagcugauucagaugucu

SEQ ID NO: 1630 - RNA, 19 nt, Artificial Sequence
  Synthetic oligonucleotide
cgggagcagcuaguccuua

SEQ ID NO: 1631 - RNA, 19 nt, Artificial Sequence
  Synthetic oligonucleotide
uaaggacuagcugcucccg

SEQ ID NO: 1632 - RNA, 19 nt, Artificial Sequence
  Synthetic oligonucleotide
gggagcagcuaguccuuga

SEQ ID NO: 1633 - RNA, 19 nt, Artificial Sequence
  Synthetic oligonucleotide
ucaaggacuagcugcuccc

SEQ ID NO: 1634 - RNA, 19 nt, Artificial Sequence
  Synthetic oligonucleotide
ggagcagcuaguccuugaa

SEQ ID NO: 1635 - RNA, 19 nt, Artificial Sequence
  Synthetic oligonucleotide
uucaaggacuagcugcucc

SEQ ID NO: 1636 - RNA, 19 nt, Artificial Sequence
  Synthetic oligonucleotide
gagcagcuaguccuugaca

SEQ ID NO: 1637 - RNA, 19 nt, Artificial Sequence
  Synthetic oligonucleotide
ugucaaggacuagcugcuc

SEQ ID NO: 1638 - RNA, 19 nt, Artificial Sequence
  Synthetic oligonucleotide
agcagcuaguccuugacua

SEQ ID NO: 1639 - RNA, 19 nt, Artificial Sequence
  Synthetic oligonucleotide
uagucaaggacuagcugcu

SEQ ID NO: 1640 - RNA, 19 nt, Artificial Sequence
  Synthetic oligonucleotide
cagcuaguccuugacugca

SEQ ID NO: 1641 - RNA, 19 nt, Artificial Sequence
  Synthetic oligonucleotide
ugcagucaaggacuagcug

SEQ ID NO: 1642 - RNA, 19 nt, Artificial Sequence
  Synthetic oligonucleotide
agcuaguccuugacugcaa

SEQ ID NO: 1643 - RNA, 19 nt, Artificial Sequence
  Synthetic oligonucleotide
uugcagucaaggacuagcu

SEQ ID NO: 1644 - RNA, 19 nt, Artificial Sequence
  Synthetic oligonucleotide
ccuugacugcagugcugaa

SEQ ID NO: 1645 - RNA, 19 nt, Artificial Sequence
  Synthetic oligonucleotide
uucagcacugcagucaagg

SEQ ID NO: 1646 - RNA, 19 nt, Artificial Sequence
  Synthetic oligonucleotide
ugacugcagugcugaauga

SEQ ID NO: 1647 - RNA, 19 nt, Artificial Sequence
  Synthetic oligonucleotide
ucauucagcacugcaguca

SEQ ID NO: 1648 - RNA, 19 nt, Artificial Sequence
  Synthetic oligonucleotide
acugcagugcugaauggca

SEQ ID NO: 1649 - RNA, 19 nt, Artificial Sequence
  Synthetic oligonucleotide
ugccauucagcacugcagu

SEQ ID NO: 1650 - RNA, 19 nt, Artificial Sequence
  Synthetic oligonucleotide
cugcagugcugaauggcua

SEQ ID NO: 1651 - RNA, 19 nt, Artificial Sequence
  Synthetic oligonucleotide
uagccauucagcacugcag

SEQ ID NO: 1652 - RNA, 19 nt, Artificial Sequence
  Synthetic oligonucleotide
ugcagugcugaauggcuua

SEQ ID NO: 1653 - RNA, 19 nt, Artificial Sequence
  Synthetic oligonucleotide
uaagccauucagcacugca

SEQ ID NO: 1654 - RNA, 19 nt, Artificial Sequence
  Synthetic oligonucleotide
gcagugcugaauggcuuga

SEQ ID NO: 1655 - RNA, 19 nt, Artificial Sequence
  Synthetic oligonucleotide
ucaagccauucagcacugc

SEQ ID NO: 1656 - RNA, 19 nt, Artificial Sequence
  Synthetic oligonucleotide
gaauggcuugauuuucuaa

SEQ ID NO: 1657 - RNA, 19 nt, Artificial Sequence
  Synthetic oligonucleotide
uuagaaaaucaagccauuc

SEQ ID NO: 1658 - RNA, 19 nt, Artificial Sequence
  Synthetic oligonucleotide
aauggcuugauuuucuaga

SEQ ID NO: 1659 - RNA, 19 nt, Artificial Sequence
  Synthetic oligonucleotide
ucuagaaaaucaagccauu

SEQ ID NO: 1660 - RNA, 19 nt, Artificial Sequence
  Synthetic oligonucleotide
auggcuugauuuucuagaa

SEQ ID NO: 1661 - RNA, 19 nt, Artificial Sequence
  Synthetic oligonucleotide
uucuagaaaaucaagccau

SEQ ID NO: 1662 - RNA, 19 nt, Artificial Sequence
  Synthetic oligonucleotide
uggcuugauuuucuagaga

SEQ ID NO: 1663 - RNA, 19 nt, Artificial Sequence
  Synthetic oligonucleotide
ucucuagaaaaucaagcca

SEQ ID NO: 1664 - RNA, 19 nt, Artificial Sequence
  Synthetic oligonucleotide
gauuuucuagagaaauuca

SEQ ID NO: 1665 - RNA, 19 nt, Artificial Sequence
  Synthetic oligonucleotide
ugaauuucucuagaaaauc

SEQ ID NO: 1666 - RNA, 19 nt, Artificial Sequence
  Synthetic oligonucleotide
uuucuagagaaauucagua

SEQ ID NO: 1667 - RNA, 19 nt, Artificial Sequence
  Synthetic oligonucleotide
uacugaauuucucuagaaa

SEQ ID NO: 1668 - RNA, 19 nt, Artificial Sequence
  Synthetic oligonucleotide
uucuagagaaauucaguga

SEQ ID NO: 1669 - RNA, 19 nt, Artificial Sequence
  Synthetic oligonucleotide
ucacugaauuucucuagaa

SEQ ID NO: 1670 - RNA, 19 nt, Artificial Sequence
  Synthetic oligonucleotide
ucuagagaaauucagugaa

SEQ ID NO: 1671 - RNA, 19 nt, Artificial Sequence
  Synthetic oligonucleotide
uucacugaauuucucuaga

SEQ ID NO: 1672 - RNA, 19 nt, Artificial Sequence
  Synthetic oligonucleotide
uagagaaauucagugaaca

SEQ ID NO: 1673 - RNA, 19 nt, Artificial Sequence
  Synthetic oligonucleotide
uguucacugaauuucucua

SEQ ID NO: 1674 - RNA, 19 nt, Artificial Sequence
  Synthetic oligonucleotide
aaauucagugaacauuaua

SEQ ID NO: 1675 - RNA, 19 nt, Artificial Sequence
  Synthetic oligonucleotide
uauaauguucacugaauuu

SEQ ID NO: 1676 - RNA, 19 nt, Artificial Sequence
  Synthetic oligonucleotide
aauucagugaacauuauca

SEQ ID NO: 1677 - RNA, 19 nt, Artificial Sequence
  Synthetic oligonucleotide
ugauaauguucacugaauu

SEQ ID NO: 1678 - RNA, 19 nt, Artificial Sequence
  Synthetic oligonucleotide
auucagugaacauuaucaa

SEQ ID NO: 1679 - RNA, 19 nt, Artificial Sequence
  Synthetic oligonucleotide
uugauaauguucacugaau

SEQ ID NO: 1680 - RNA, 19 nt, Artificial Sequence
  Synthetic oligonucleotide
gugaacauuaucacuccua

SEQ ID NO: 1681 - RNA, 19 nt, Artificial Sequence
  Synthetic oligonucleotide
uaggagugauaauguucac

SEQ ID NO: 1682 - RNA, 19 nt, Artificial Sequence
  Synthetic oligonucleotide
ugaacauuaucacuccuua

SEQ ID NO: 1683 - RNA, 19 nt, Artificial Sequence
  Synthetic oligonucleotide
uaaggagugauaauguuca

SEQ ID NO: 1684 - RNA, 19 nt, Artificial Sequence
  Synthetic oligonucleotide
gaacauuaucacuccuuga

SEQ ID NO: 1685 - RNA, 19 nt, Artificial Sequence
  Synthetic oligonucleotide
ucaaggagugauaauguuc

SEQ ID NO: 1686 - RNA, 19 nt, Artificial Sequence
  Synthetic oligonucleotide
acauuaucacuccuuguga

SEQ ID NO: 1687 - RNA, 19 nt, Artificial Sequence
  Synthetic oligonucleotide
ucacaaggagugauaaugu

SEQ ID NO: 1688 - RNA, 19 nt, Artificial Sequence
  Synthetic oligonucleotide
aucacuccuuguguaaaga

SEQ ID NO: 1689 - RNA, 19 nt, Artificial Sequence
  Synthetic oligonucleotide
ucuuuacacaaggagugau

SEQ ID NO: 1690 - RNA, 19 nt, Artificial Sequence
  Synthetic oligonucleotide
acuccuuguguaaagcaga

SEQ ID NO: 1691 - RNA, 19 nt, Artificial Sequence
  Synthetic oligonucleotide
ucugcuuuacacaaggagu

SEQ ID NO: 1692 - RNA, 19 nt, Artificial Sequence
  Synthetic oligonucleotide
uuguguaaagcagugcaua

SEQ ID NO: 1693 - RNA, 19 nt, Artificial Sequence
  Synthetic oligonucleotide
uaugcacugcuuuacacaa

SEQ ID NO: 1694 - RNA, 19 nt, Artificial Sequence
  Synthetic oligonucleotide
uaaagcagugcaucaccua

SEQ ID NO: 1695 - RNA, 19 nt, Artificial Sequence
  Synthetic oligonucleotide
uaggugaugcacugcuuua

SEQ ID NO: 1696 - RNA, 19 nt, Artificial Sequence
  Synthetic oligonucleotide
aaagcagugcaucaccuaa

SEQ ID NO: 1697 - RNA, 19 nt, Artificial Sequence
  Synthetic oligonucleotide
uuaggugaugcacugcuuu

SEQ ID NO: 1698 - RNA, 19 nt, Artificial Sequence
  Synthetic oligonucleotide
gugcaucaccuagcaacua

SEQ ID NO: 1699 - RNA, 19 nt, Artificial Sequence
  Synthetic oligonucleotide
uaguugcuaggugaugcac

SEQ ID NO: 1700 - RNA, 19 nt, Artificial Sequence
  Synthetic oligonucleotide
gcaucaccuagcaacugua

SEQ ID NO: 1701 - RNA, 19 nt, Artificial Sequence
  Synthetic oligonucleotide
uacaguugcuaggugaugc

SEQ ID NO: 1702 - RNA, 19 nt, Artificial Sequence
  Synthetic oligonucleotide
ucaccuagcaacuguugaa

SEQ ID NO: 1703 - RNA, 19 nt, Artificial Sequence
  Synthetic oligonucleotide
uucaacaguugcuagguga

SEQ ID NO: 1704 - RNA, 19 nt, Artificial Sequence
  Synthetic oligonucleotide
accuagcaacuguugacua

SEQ ID NO: 1705 - RNA, 19 nt, Artificial Sequence
  Synthetic oligonucleotide
uagucaacaguugcuaggu

SEQ ID NO: 1706 - RNA, 19 nt, Artificial Sequence
  Synthetic oligonucleotide
ccuagcaacuguugacuga

SEQ ID NO: 1707 - RNA, 19 nt, Artificial Sequence
  Synthetic oligonucleotide
ucagucaacaguugcuagg

SEQ ID NO: 1708 - RNA, 19 nt, Artificial Sequence
  Synthetic oligonucleotide
cuagcaacuguugacugca

SEQ ID NO: 1709 - RNA, 19 nt, Artificial Sequence
  Synthetic oligonucleotide
ugcagucaacaguugcuag

SEQ ID NO: 1710 - RNA, 19 nt, Artificial Sequence
  Synthetic oligonucleotide
uagcaacuguugacugcaa

SEQ ID NO: 1711 - RNA, 19 nt, Artificial Sequence
  Synthetic oligonucleotide
uugcagucaacaguugcua

SEQ ID NO: 1712 - RNA, 19 nt, Artificial Sequence
  Synthetic oligonucleotide
agcaacuguugacugcaua

SEQ ID NO: 1713 - RNA, 19 nt, Artificial Sequence
  Synthetic oligonucleotide
uaugcagucaacaguugcu

SEQ ID NO: 1714 - RNA, 19 nt, Artificial Sequence
  Synthetic oligonucleotide
gcaacuguugacugcauua

SEQ ID NO: 1715 - RNA, 19 nt, Artificial Sequence
  Synthetic oligonucleotide
uaaugcagucaacaguugc

SEQ ID NO: 1716 - RNA, 19 nt, Artificial Sequence
  Synthetic oligonucleotide
aacuguugacugcauuuua

SEQ ID NO: 1717 - RNA, 19 nt, Artificial Sequence
  Synthetic oligonucleotide
uaaaaugcagucaacaguu

SEQ ID NO: 1718 - RNA, 19 nt, Artificial Sequence
  Synthetic oligonucleotide
acuguugacugcauuuuca

SEQ ID NO: 1719 - RNA, 19 nt, Artificial Sequence
  Synthetic oligonucleotide
ugaaaaugcagucaacagu

SEQ ID NO: 1720 - RNA, 19 nt, Artificial Sequence
  Synthetic oligonucleotide
cuguugacugcauuuucua

SEQ ID NO: 1721 - RNA, 19 nt, Artificial Sequence
  Synthetic oligonucleotide
uagaaaaugcagucaacag

SEQ ID NO: 1722 - RNA, 19 nt, Artificial Sequence
  Synthetic oligonucleotide
uguugacugcauuuucuca

SEQ ID NO: 1723 - RNA, 19 nt, Artificial Sequence
  Synthetic oligonucleotide
ugagaaaaugcagucaaca

SEQ ID NO: 1724 - RNA, 19 nt, Artificial Sequence
  Synthetic oligonucleotide
ccuggccaaggucgcuaaa

SEQ ID NO: 1725 - RNA, 19 nt, Artificial Sequence
  Synthetic oligonucleotide
uuuagcgaccuuggccagg

SEQ ID NO: 1726 - RNA, 19 nt, Artificial Sequence
  Synthetic oligonucleotide
ccaaggucgcuaagcaaga

SEQ ID NO: 1727 - RNA, 19 nt, Artificial Sequence
  Synthetic oligonucleotide
ucuugcuuagcgaccuugg

SEQ ID NO: 1728 - RNA, 19 nt, Artificial Sequence
  Synthetic oligonucleotide
caaggucgcuaagcaagga

SEQ ID NO: 1729 - RNA, 19 nt, Artificial Sequence
  Synthetic oligonucleotide
uccuugcuuagcgaccuug

SEQ ID NO: 1730 - RNA, 19 nt, Artificial Sequence
  Synthetic oligonucleotide
aaggucgcuaagcaaggaa

SEQ ID NO: 1731 - RNA, 19 nt, Artificial Sequence
  Synthetic oligonucleotide
uuccuugcuuagcgaccuu

SEQ ID NO: 1732 - RNA, 19 nt, Artificial Sequence
  Synthetic oligonucleotide
gcuaagcaaggagauuaca

SEQ ID NO: 1733 - RNA, 19 nt, Artificial Sequence
  Synthetic oligonucleotide
uguaaucuccuugcuuagc

SEQ ID NO: 1734 - RNA, 19 nt, Artificial Sequence
  Synthetic oligonucleotide
cuaagcaaggagauuacua

SEQ ID NO: 1735 - RNA, 19 nt, Artificial Sequence
  Synthetic oligonucleotide
uaguaaucuccuugcuuag

SEQ ID NO: 1736 - RNA, 19 nt, Artificial Sequence
  Synthetic oligonucleotide
uaagcaaggagauuacuga

SEQ ID NO: 1737 - RNA, 19 nt, Artificial Sequence
  Synthetic oligonucleotide
ucaguaaucuccuugcuua

SEQ ID NO: 1738 - RNA, 19 nt, Artificial Sequence
  Synthetic oligonucleotide
aagcaaggagauuacugca

SEQ ID NO: 1739 - RNA, 19 nt, Artificial Sequence
  Synthetic oligonucleotide
ugcaguaaucuccuugcuu

SEQ ID NO: 1740 - RNA, 19 nt, Artificial Sequence
  Synthetic oligonucleotide
gcaaggagauuacugcaga

SEQ ID NO: 1741 - RNA, 19 nt, Artificial Sequence
  Synthetic oligonucleotide
ucugcaguaaucuccuugc

SEQ ID NO: 1742 - RNA, 19 nt, Artificial Sequence
  Synthetic oligonucleotide
caaggagauuacugcagaa

SEQ ID NO: 1743 - RNA, 19 nt, Artificial Sequence
  Synthetic oligonucleotide
uucugcaguaaucuccuug

SEQ ID NO: 1744 - RNA, 19 nt, Artificial Sequence
  Synthetic oligonucleotide
gagauuacugcagaccaaa

SEQ ID NO: 1745 - RNA, 19 nt, Artificial Sequence
  Synthetic oligonucleotide
uuuggucugcaguaaucuc

SEQ ID NO: 1746 - RNA, 19 nt, Artificial Sequence
  Synthetic oligonucleotide
agauuacugcagaccaaca

SEQ ID NO: 1747 - RNA, 19 nt, Artificial Sequence
  Synthetic oligonucleotide
uguuggucugcaguaaucu

SEQ ID NO: 1748 - RNA, 19 nt, Artificial Sequence
  Synthetic oligonucleotide
gauuacugcagaccaacua

SEQ ID NO: 1749 - RNA, 19 nt, Artificial Sequence
  Synthetic oligonucleotide
uaguuggucugcaguaauc

SEQ ID NO: 1750 - RNA, 19 nt, Artificial Sequence
  Synthetic oligonucleotide
auuacugcagaccaacuga

SEQ ID NO: 1751 - RNA, 19 nt, Artificial Sequence
  Synthetic oligonucleotide
ucaguuggucugcaguaau

SEQ ID NO: 1752 - RNA, 19 nt, Artificial Sequence
  Synthetic oligonucleotide
uacugcagaccaacuguaa

SEQ ID NO: 1753 - RNA, 19 nt, Artificial Sequence
  Synthetic oligonucleotide
uuacaguuggucugcagua

SEQ ID NO: 1754 - RNA, 19 nt, Artificial Sequence
  Synthetic oligonucleotide
cugcagaccaacuguacaa

SEQ ID NO: 1755 - RNA, 19 nt, Artificial Sequence
  Synthetic oligonucleotide
uuguacaguuggucugcag

SEQ ID NO: 1756 - RNA, 19 nt, Artificial Sequence
  Synthetic oligonucleotide
ugcagaccaacuguacaaa

SEQ ID NO: 1757 - RNA, 19 nt, Artificial Sequence
  Synthetic oligonucleotide
uuuguacaguuggucugca

SEQ ID NO: 1758 - RNA, 19 nt, Artificial Sequence
  Synthetic oligonucleotide
gcagaccaacuguacaaga

SEQ ID NO: 1759 - RNA, 19 nt, Artificial Sequence
  Synthetic oligonucleotide
ucuuguacaguuggucugc

SEQ ID NO: 1760 - RNA, 19 nt, Artificial Sequence
  Synthetic oligonucleotide
cagaccaacuguacaagaa

SEQ ID NO: 1761 - RNA, 19 nt, Artificial Sequence
  Synthetic oligonucleotide
uucuuguacaguuggucug

SEQ ID NO: 1762 - RNA, 19 nt, Artificial Sequence
  Synthetic oligonucleotide
agaccaacuguacaagaaa

SEQ ID NO: 1763 - RNA, 19 nt, Artificial Sequence
  Synthetic oligonucleotide
uuucuuguacaguuggucu

SEQ ID NO: 1764 - RNA, 19 nt, Artificial Sequence
  Synthetic oligonucleotide
caacuguacaagaagaaaa

SEQ ID NO: 1765 - RNA, 19 nt, Artificial Sequence
  Synthetic oligonucleotide
uuuucuucuuguacaguug

SEQ ID NO: 1766 - RNA, 19 nt, Artificial Sequence
  Synthetic oligonucleotide
acuguacaagaagaaagaa

SEQ ID NO: 1767 - RNA, 19 nt, Artificial Sequence
  Synthetic oligonucleotide
uucuuucuucuuguacagu

SEQ ID NO: 1768 - RNA, 19 nt, Artificial Sequence
  Synthetic oligonucleotide
cuguacaagaagaaagaaa

SEQ ID NO: 1769 - RNA, 19 nt, Artificial Sequence
  Synthetic oligonucleotide
uuucuuucuucuuguacag

SEQ ID NO: 1770 - RNA, 19 nt, Artificial Sequence
  Synthetic oligonucleotide
uguacaagaagaaagaaaa

SEQ ID NO: 1771 - RNA, 19 nt, Artificial Sequence
  Synthetic oligonucleotide
uuuucuuucuucuuguaca

SEQ ID NO: 1772 - RNA, 19 nt, Artificial Sequence
  Synthetic oligonucleotide
uggaaggcacccugugaua

SEQ ID NO: 1773 - RNA, 19 nt, Artificial Sequence
  Synthetic oligonucleotide
uaucacagggugccuucca

SEQ ID NO: 1774 - RNA, 19 nt, Artificial Sequence
  Synthetic oligonucleotide
ggaaggcacccugugauua

SEQ ID NO: 1775 - RNA, 19 nt, Artificial Sequence
  Synthetic oligonucleotide
uaaucacagggugccuucc

SEQ ID NO: 1776 - RNA, 19 nt, Artificial Sequence
  Synthetic oligonucleotide
aaggcacccugugauugaa

SEQ ID NO: 1777 - RNA, 19 nt, Artificial Sequence
  Synthetic oligonucleotide
uucaaucacagggugccuu

SEQ ID NO: 1778 - RNA, 19 nt, Artificial Sequence
  Synthetic oligonucleotide
aggcacccugugauugaua

SEQ ID NO: 1779 - RNA, 19 nt, Artificial Sequence
  Synthetic oligonucleotide
uaucaaucacagggugccu

SEQ ID NO: 1780 - RNA, 19 nt, Artificial Sequence
  Synthetic oligonucleotide
ggcacccugugauugauga

SEQ ID NO: 1781 - RNA, 19 nt, Artificial Sequence
  Synthetic oligonucleotide
ucaucaaucacagggugcc

SEQ ID NO: 1782 - RNA, 19 nt, Artificial Sequence
  Synthetic oligonucleotide
gcacccugugauugaugua

SEQ ID NO: 1783 - RNA, 19 nt, Artificial Sequence
  Synthetic oligonucleotide
uacaucaaucacagggugc

SEQ ID NO: 1784 - RNA, 19 nt, Artificial Sequence
  Synthetic oligonucleotide
cacccugugauugauguga

SEQ ID NO: 1785 - RNA, 19 nt, Artificial Sequence
  Synthetic oligonucleotide
ucacaucaaucacagggug

SEQ ID NO: 1786 - RNA, 19 nt, Artificial Sequence
  Synthetic oligonucleotide
cugugauugauguguugca

SEQ ID NO: 1787 - RNA, 19 nt, Artificial Sequence
  Synthetic oligonucleotide
ugcaacacaucaaucacag

SEQ ID NO: 1788 - RNA, 19 nt, Artificial Sequence
  Synthetic oligonucleotide
ugugauugauguguugcua

SEQ ID NO: 1789 - RNA, 19 nt, Artificial Sequence
  Synthetic oligonucleotide
uagcaacacaucaaucaca

SEQ ID NO: 1790 - RNA, 19 nt, Artificial Sequence
  Synthetic oligonucleotide
gugauugauguguugcuga

SEQ ID NO: 1791 - RNA, 19 nt, Artificial Sequence
  Synthetic oligonucleotide
ucagcaacacaucaaucac

SEQ ID NO: 1792 - RNA, 19 nt, Artificial Sequence
  Synthetic oligonucleotide
uguguugcugggagaacaa

SEQ ID NO: 1793 - RNA, 19 nt, Artificial Sequence
  Synthetic oligonucleotide
uuguucucccagcaacaca

SEQ ID NO: 1794 - RNA, 19 nt, Artificial Sequence
  Synthetic oligonucleotide
cugggagaacaggaucaaa

SEQ ID NO: 1795 - RNA, 19 nt, Artificial Sequence
  Synthetic oligonucleotide
uuugauccuguucucccag

SEQ ID NO: 1796 - RNA, 19 nt, Artificial Sequence
  Synthetic oligonucleotide
ugggagaacaggaucaaua

SEQ ID NO: 1797 - RNA, 19 nt, Artificial Sequence
  Synthetic oligonucleotide
uauugauccuguucuccca

SEQ ID NO: 1798 - RNA, 19 nt, Artificial Sequence
  Synthetic oligonucleotide
gggagaacaggaucaauaa

SEQ ID NO: 1799 - RNA, 19 nt, Artificial Sequence
  Synthetic oligonucleotide
uuauugauccuguucuccc

SEQ ID NO: 1800 - RNA, 19 nt, Artificial Sequence
  Synthetic oligonucleotide
gagaacaggaucaauauga

SEQ ID NO: 1801 - RNA, 19 nt, Artificial Sequence
  Synthetic oligonucleotide
ucauauugauccuguucuc

SEQ ID NO: 1802 - RNA, 19 nt, Artificial Sequence
  Synthetic oligonucleotide
agaacaggaucaauaugua

SEQ ID NO: 1803 - RNA, 19 nt, Artificial Sequence
  Synthetic oligonucleotide
uacauauugauccuguucu

SEQ ID NO: 1804 - RNA, 19 nt, Artificial Sequence
  Synthetic oligonucleotide
aggaucaauaugucccaaa

SEQ ID NO: 1805 - RNA, 19 nt, Artificial Sequence
  Synthetic oligonucleotide
uuugggacauauugauccu

SEQ ID NO: 1806 - RNA, 19 nt, Artificial Sequence
  Synthetic oligonucleotide
ggaucaauaugucccaaaa

SEQ ID NO: 1807 - RNA, 19 nt, Artificial Sequence
  Synthetic oligonucleotide
uuuugggacauauugaucc

SEQ ID NO: 1808 - RNA, 19 nt, Artificial Sequence
  Synthetic oligonucleotide
gaucaauaugucccaaaua

SEQ ID NO: 1809 - RNA, 19 nt, Artificial Sequence
  Synthetic oligonucleotide
uauuugggacauauugauc

SEQ ID NO: 1810 - RNA, 19 nt, Artificial Sequence
  Synthetic oligonucleotide
aucaauaugucccaaauaa

SEQ ID NO: 1811 - RNA, 19 nt, Artificial Sequence
  Synthetic oligonucleotide
uuauuugggacauauugau

SEQ ID NO: 1812 - RNA, 19 nt, Artificial Sequence
  Synthetic oligonucleotide
caauaugucccaaauaaua

SEQ ID NO: 1813 - RNA, 19 nt, Artificial Sequence
  Synthetic oligonucleotide
uauuauuugggacauauug

SEQ ID NO: 1814 - RNA, 19 nt, Artificial Sequence
  Synthetic oligonucleotide
auaugucccaaauaauaca

SEQ ID NO: 1815 - RNA, 19 nt, Artificial Sequence
  Synthetic oligonucleotide
uguauuauuugggacauau

SEQ ID NO: 1816 - RNA, 19 nt, Artificial Sequence
  Synthetic oligonucleotide
gucccaaauaauacagaua

SEQ ID NO: 1817 - RNA, 19 nt, Artificial Sequence
  Synthetic oligonucleotide
uaucuguauuauuugggac

SEQ ID NO: 1818 - RNA, 19 nt, Artificial Sequence
  Synthetic oligonucleotide
cccaaauaauacagauuua

SEQ ID NO: 1819 - RNA, 19 nt, Artificial Sequence
  Synthetic oligonucleotide
uaaaucuguauuauuuggg

SEQ ID NO: 1820 - RNA, 19 nt, Artificial Sequence
  Synthetic oligonucleotide
auaauacagauuuaucaga

SEQ ID NO: 1821 - RNA, 19 nt, Artificial Sequence
  Synthetic oligonucleotide
ucugauaaaucuguauuau

SEQ ID NO: 1822 - RNA, 19 nt, Artificial Sequence
  Synthetic oligonucleotide
uaauacagauuuaucagaa

SEQ ID NO: 1823 - RNA, 19 nt, Artificial Sequence
  Synthetic oligonucleotide
uucugauaaaucuguauua

SEQ ID NO: 1824 - RNA, 19 nt, Artificial Sequence
  Synthetic oligonucleotide
aauacagauuuaucagaga

SEQ ID NO: 1825 - RNA, 19 nt, Artificial Sequence
  Synthetic oligonucleotide
ucucugauaaaucuguauu

SEQ ID NO: 1826 - RNA, 19 nt, Artificial Sequence
  Synthetic oligonucleotide
uacagauuuaucagaggaa

SEQ ID NO: 1827 - RNA, 19 nt, Artificial Sequence
  Synthetic oligonucleotide
uuccucugauaaaucugua

SEQ ID NO: 1828 - RNA, 19 nt, Artificial Sequence
  Synthetic oligonucleotide
gauuuaucagaggacucaa

SEQ ID NO: 1829 - RNA, 19 nt, Artificial Sequence
  Synthetic oligonucleotide
uugaguccucugauaaauc

SEQ ID NO: 1830 - RNA, 19 nt, Artificial Sequence
  Synthetic oligonucleotide
uuaucagaggacucagaga

SEQ ID NO: 1831 - RNA, 19 nt, Artificial Sequence
  Synthetic oligonucleotide
ucucugaguccucugauaa

SEQ ID NO: 1832 - RNA, 19 nt, Artificial Sequence
  Synthetic oligonucleotide
ggacucagagagaguaaua

SEQ ID NO: 1833 - RNA, 19 nt, Artificial Sequence
  Synthetic oligonucleotide
uauuacucucucugagucc

SEQ ID NO: 1834 - RNA, 19 nt, Artificial Sequence
  Synthetic oligonucleotide
gacucagagagaguaauga

SEQ ID NO: 1835 - RNA, 19 nt, Artificial Sequence
  Synthetic oligonucleotide
ucauuacucucucugaguc

SEQ ID NO: 1836 - RNA, 19 nt, Artificial Sequence
  Synthetic oligonucleotide
acucagagagaguaaugaa

SEQ ID NO: 1837 - RNA, 19 nt, Artificial Sequence
  Synthetic oligonucleotide
uucauuacucucucugagu

SEQ ID NO: 1838 - RNA, 19 nt, Artificial Sequence
  Synthetic oligonucleotide
ucagagagaguaaugauaa

SEQ ID NO: 1839 - RNA, 19 nt, Artificial Sequence
  Synthetic oligonucleotide
uuaucauuacucucucuga

SEQ ID NO: 1840 - RNA, 19 nt, Artificial Sequence
  Synthetic oligonucleotide
cagagagaguaaugauaaa

SEQ ID NO: 1841 - RNA, 19 nt, Artificial Sequence
  Synthetic oligonucleotide
uuuaucauuacucucucug

SEQ ID NO: 1842 - RNA, 19 nt, Artificial Sequence
  Synthetic oligonucleotide
agagagaguaaugauaaua

SEQ ID NO: 1843 - RNA, 19 nt, Artificial Sequence
  Synthetic oligonucleotide
uauuaucauuacucucucu

SEQ ID NO: 1844 - RNA, 19 nt, Artificial Sequence
  Synthetic oligonucleotide
agaguaaugauaauuacca

SEQ ID NO: 1845 - RNA, 19 nt, Artificial Sequence
  Synthetic oligonucleotide
ugguaauuaucauuacucu

SEQ ID NO: 1846 - RNA, 19 nt, Artificial Sequence
  Synthetic oligonucleotide
aguaaugauaauuaccgga

SEQ ID NO: 1847 - RNA, 19 nt, Artificial Sequence
  Synthetic oligonucleotide
uccgguaauuaucauuacu

SEQ ID NO: 1848 - RNA, 19 nt, Artificial Sequence
  Synthetic oligonucleotide
auaauuaccggaccaaaca

SEQ ID NO: 1849 - RNA, 19 nt, Artificial Sequence
  Synthetic oligonucleotide
uguuugguccgguaauuau

SEQ ID NO: 1850 - RNA, 19 nt, Artificial Sequence
  Synthetic oligonucleotide
uaauuaccggaccaaacaa

SEQ ID NO: 1851 - RNA, 19 nt, Artificial Sequence
  Synthetic oligonucleotide
uuguuugguccgguaauua

SEQ ID NO: 1852 - RNA, 19 nt, Artificial Sequence
  Synthetic oligonucleotide
aauuaccggaccaaacaua

SEQ ID NO: 1853 - RNA, 19 nt, Artificial Sequence
  Synthetic oligonucleotide
uauguuugguccgguaauu

SEQ ID NO: 1854 - RNA, 19 nt, Artificial Sequence
  Synthetic oligonucleotide
auuaccggaccaaacauga

SEQ ID NO: 1855 - RNA, 19 nt, Artificial Sequence
  Synthetic oligonucleotide
ucauguuugguccgguaau

SEQ ID NO: 1856 - RNA, 19 nt, Artificial Sequence
  Synthetic oligonucleotide
uuaccggaccaaacaugga

SEQ ID NO: 1857 - RNA, 19 nt, Artificial Sequence
  Synthetic oligonucleotide
uccauguuugguccgguaa

SEQ ID NO: 1858 - RNA, 19 nt, Artificial Sequence
  Synthetic oligonucleotide
accaaacauggguggaaaa

SEQ ID NO: 1859 - RNA, 19 nt, Artificial Sequence
  Synthetic oligonucleotide
uuuuccacccauguuuggu

SEQ ID NO: 1860 - RNA, 19 nt, Artificial Sequence
  Synthetic oligonucleotide
caaacauggguggaaagaa

SEQ ID NO: 1861 - RNA, 19 nt, Artificial Sequence
  Synthetic oligonucleotide
uucuuuccacccauguuug

SEQ ID NO: 1862 - RNA, 19 nt, Artificial Sequence
  Synthetic oligonucleotide
aaacauggguggaaagaga

SEQ ID NO: 1863 - RNA, 19 nt, Artificial Sequence
  Synthetic oligonucleotide
ucucuuuccacccauguuu

SEQ ID NO: 1864 - RNA, 19 nt, Artificial Sequence
  Synthetic oligonucleotide
aacauggguggaaagagca

SEQ ID NO: 1865 - RNA, 19 nt, Artificial Sequence
  Synthetic oligonucleotide
ugcucuuuccacccauguu

SEQ ID NO: 1866 - RNA, 19 nt, Artificial Sequence
  Synthetic oligonucleotide
uggaaagagcuccuacaua

SEQ ID NO: 1867 - RNA, 19 nt, Artificial Sequence
  Synthetic oligonucleotide
uauguaggagcucuuucca

SEQ ID NO: 1868 - RNA, 19 nt, Artificial Sequence
  Synthetic oligonucleotide
gaaagagcuccuacauaaa

SEQ ID NO: 1869 - RNA, 19 nt, Artificial Sequence
  Synthetic oligonucleotide
uuuauguaggagcucuuuc

SEQ ID NO: 1870 - RNA, 19 nt, Artificial Sequence
  Synthetic oligonucleotide
gagcuccuacauaaaacaa

SEQ ID NO: 1871 - RNA, 19 nt, Artificial Sequence
  Synthetic oligonucleotide
uuguuuuauguaggagcuc

SEQ ID NO: 1872 - RNA, 19 nt, Artificial Sequence
  Synthetic oligonucleotide
agcuccuacauaaaacaaa

SEQ ID NO: 1873 - RNA, 19 nt, Artificial Sequence
  Synthetic oligonucleotide
uuuguuuuauguaggagcu

SEQ ID NO: 1874 - RNA, 19 nt, Artificial Sequence
  Synthetic oligonucleotide
gcuccuacauaaaacaaga

SEQ ID NO: 1875 - RNA, 19 nt, Artificial Sequence
  Synthetic oligonucleotide
ucuuguuuuauguaggagc

SEQ ID NO: 1876 - RNA, 19 nt, Artificial Sequence
  Synthetic oligonucleotide
uccuacauaaaacaaguua

SEQ ID NO: 1877 - RNA, 19 nt, Artificial Sequence
  Synthetic oligonucleotide
uaacuuguuuuauguagga

SEQ ID NO: 1878 - RNA, 19 nt, Artificial Sequence
  Synthetic oligonucleotide
cuacauaaaacaaguugca

SEQ ID NO: 1879 - RNA, 19 nt, Artificial Sequence
  Synthetic oligonucleotide
ugcaacuuguuuuauguag

SEQ ID NO: 1880 - RNA, 19 nt, Artificial Sequence
  Synthetic oligonucleotide
uacauaaaacaaguugcaa

SEQ ID NO: 1881 - RNA, 19 nt, Artificial Sequence
  Synthetic oligonucleotide
uugcaacuuguuuuaugua

SEQ ID NO: 1882 - RNA, 19 nt, Artificial Sequence
  Synthetic oligonucleotide
uaaaacaaguugcauugaa

SEQ ID NO: 1883 - RNA, 19 nt, Artificial Sequence
  Synthetic oligonucleotide
uucaaugcaacuuguuuua

SEQ ID NO: 1884 - RNA, 19 nt, Artificial Sequence
  Synthetic oligonucleotide
aaaacaaguugcauugaua

SEQ ID NO: 1885 - RNA, 19 nt, Artificial Sequence
  Synthetic oligonucleotide
uaucaaugcaacuuguuuu

SEQ ID NO: 1886 - RNA, 19 nt, Artificial Sequence
  Synthetic oligonucleotide
aaacaaguugcauugauua

SEQ ID NO: 1887 - RNA, 19 nt, Artificial Sequence
  Synthetic oligonucleotide
uaaucaaugcaacuuguuu

SEQ ID NO: 1888 - RNA, 19 nt, Artificial Sequence
  Synthetic oligonucleotide
aacaaguugcauugauuaa

SEQ ID NO: 1889 - RNA, 19 nt, Artificial Sequence
  Synthetic oligonucleotide
uuaaucaaugcaacuuguu

SEQ ID NO: 1890 - RNA, 19 nt, Artificial Sequence
  Synthetic oligonucleotide
acaaguugcauugauuaca

SEQ ID NO: 1891 - RNA, 19 nt, Artificial Sequence
  Synthetic oligonucleotide
uguaaucaaugcaacuugu

SEQ ID NO: 1892 - RNA, 19 nt, Artificial Sequence
  Synthetic oligonucleotide
caaguugcauugauuacca

SEQ ID NO: 1893 - RNA, 19 nt, Artificial Sequence
  Synthetic oligonucleotide
ugguaaucaaugcaacuug

SEQ ID NO: 1894 - RNA, 19 nt, Artificial Sequence
  Synthetic oligonucleotide
aguugcauugauuaccaua

SEQ ID NO: 1895 - RNA, 19 nt, Artificial Sequence
  Synthetic oligonucleotide
uaugguaaucaaugcaacu

SEQ ID NO: 1896 - RNA, 19 nt, Artificial Sequence
  Synthetic oligonucleotide
guugcauugauuaccauca

SEQ ID NO: 1897 - RNA, 19 nt, Artificial Sequence
  Synthetic oligonucleotide
ugaugguaaucaaugcaac

SEQ ID NO: 1898 - RNA, 19 nt, Artificial Sequence
  Synthetic oligonucleotide
uugcauugauuaccaucaa

SEQ ID NO: 1899 - RNA, 19 nt, Artificial Sequence
  Synthetic oligonucleotide
uugaugguaaucaaugcaa

SEQ ID NO: 1900 - RNA, 19 nt, Artificial Sequence
  Synthetic oligonucleotide
ugcauugauuaccaucaua

SEQ ID NO: 1901 - RNA, 19 nt, Artificial Sequence
  Synthetic oligonucleotide
uaugaugguaaucaaugca

SEQ ID NO: 1902 - RNA, 19 nt, Artificial Sequence
  Synthetic oligonucleotide
cauugauuaccaucaugga

SEQ ID NO: 1903 - RNA, 19 nt, Artificial Sequence
  Synthetic oligonucleotide
uccaugaugguaaucaaug

SEQ ID NO: 1904 - RNA, 19 nt, Artificial Sequence
  Synthetic oligonucleotide
auugauuaccaucauggca

SEQ ID NO: 1905 - RNA, 19 nt, Artificial Sequence
  Synthetic oligonucleotide
ugccaugaugguaaucaau

SEQ ID NO: 1906 - RNA, 19 nt, Artificial Sequence
  Synthetic oligonucleotide
uaccaucauggcucagaua

SEQ ID NO: 1907 - RNA, 19 nt, Artificial Sequence
  Synthetic oligonucleotide
uaucugagccaugauggua

SEQ ID NO: 1908 - RNA, 19 nt, Artificial Sequence
  Synthetic oligonucleotide
accaucauggcucagauua

SEQ ID NO: 1909 - RNA, 19 nt, Artificial Sequence
  Synthetic oligonucleotide
uaaucugagccaugauggu

SEQ ID NO: 1910 - RNA, 19 nt, Artificial Sequence
  Synthetic oligonucleotide
ccaucauggcucagauuga

SEQ ID NO: 1911 - RNA, 19 nt, Artificial Sequence
  Synthetic oligonucleotide
ucaaucugagccaugaugg

SEQ ID NO: 1912 - RNA, 19 nt, Artificial Sequence
  Synthetic oligonucleotide
caucauggcucagauugga

SEQ ID NO: 1913 - RNA, 19 nt, Artificial Sequence
  Synthetic oligonucleotide
uccaaucugagccaugaug

SEQ ID NO: 1914 - RNA, 19 nt, Artificial Sequence
  Synthetic oligonucleotide
aucauggcucagauuggca

SEQ ID NO: 1915 - RNA, 19 nt, Artificial Sequence
  Synthetic oligonucleotide
ugccaaucugagccaugau

SEQ ID NO: 1916 - RNA, 19 nt, Artificial Sequence
  Synthetic oligonucleotide
cauggcucagauuggcuca

SEQ ID NO: 1917 - RNA, 19 nt, Artificial Sequence
  Synthetic oligonucleotide
ugagccaaucugagccaug

SEQ ID NO: 1918 - RNA, 19 nt, Artificial Sequence
  Synthetic oligonucleotide
cucagauuggcuccuauga

SEQ ID NO: 1919 - RNA, 19 nt, Artificial Sequence
  Synthetic oligonucleotide
ucauaggagccaaucugag

SEQ ID NO: 1920 - RNA, 19 nt, Artificial Sequence
  Synthetic oligonucleotide
cagauuggcuccuauguua

SEQ ID NO: 1921 - RNA, 19 nt, Artificial Sequence
  Synthetic oligonucleotide
uaacauaggagccaaucug

SEQ ID NO: 1922 - RNA, 19 nt, Artificial Sequence
  Synthetic oligonucleotide
auuggcuccuauguuccua

SEQ ID NO: 1923 - RNA, 19 nt, Artificial Sequence
  Synthetic oligonucleotide
uaggaacauaggagccaau

SEQ ID NO: 1924 - RNA, 19 nt, Artificial Sequence
  Synthetic oligonucleotide
uuggcuccuauguuccuga

SEQ ID NO: 1925 - RNA, 19 nt, Artificial Sequence
  Synthetic oligonucleotide
ucaggaacauaggagccaa

SEQ ID NO: 1926 - RNA, 19 nt, Artificial Sequence
  Synthetic oligonucleotide
ggcuccuauguuccugcaa

SEQ ID NO: 1927 - RNA, 19 nt, Artificial Sequence
  Synthetic oligonucleotide
uugcaggaacauaggagcc

SEQ ID NO: 1928 - RNA, 19 nt, Artificial Sequence
  Synthetic oligonucleotide
uccuauguuccugcagaaa

SEQ ID NO: 1929 - RNA, 19 nt, Artificial Sequence
  Synthetic oligonucleotide
uuucugcaggaacauagga

SEQ ID NO: 1930 - RNA, 19 nt, Artificial Sequence
  Synthetic oligonucleotide
ccuauguuccugcagaaga

SEQ ID NO: 1931 - RNA, 19 nt, Artificial Sequence
  Synthetic oligonucleotide
ucuucugcaggaacauagg

SEQ ID NO: 1932 - RNA, 19 nt, Artificial Sequence
  Synthetic oligonucleotide
cuauguuccugcagaagaa

SEQ ID NO: 1933 - RNA, 19 nt, Artificial Sequence
  Synthetic oligonucleotide
uucuucugcaggaacauag

SEQ ID NO: 1934 - RNA, 19 nt, Artificial Sequence
  Synthetic oligonucleotide
cugcagaagaagcgacaaa

SEQ ID NO: 1935 - RNA, 19 nt, Artificial Sequence
  Synthetic oligonucleotide
uuugucgcuucuucugcag

SEQ ID NO: 1936 - RNA, 19 nt, Artificial Sequence
  Synthetic oligonucleotide
ugcagaagaagcgacaaua

SEQ ID NO: 1937 - RNA, 19 nt, Artificial Sequence
  Synthetic oligonucleotide
uauugucgcuucuucugca

SEQ ID NO: 1938 - RNA, 19 nt, Artificial Sequence
  Synthetic oligonucleotide
gcagaagaagcgacaauua

SEQ ID NO: 1939 - RNA, 19 nt, Artificial Sequence
  Synthetic oligonucleotide
uaauugucgcuucuucugc

SEQ ID NO: 1940 - RNA, 19 nt, Artificial Sequence
  Synthetic oligonucleotide
agaagaagcgacaauugga

SEQ ID NO: 1941 - RNA, 19 nt, Artificial Sequence
  Synthetic oligonucleotide
uccaauugucgcuucuucu

SEQ ID NO: 1942 - RNA, 19 nt, Artificial Sequence
  Synthetic oligonucleotide
aagaagcgacaauugggaa

SEQ ID NO: 1943 - RNA, 19 nt, Artificial Sequence
  Synthetic oligonucleotide
uucccaauugucgcuucuu

SEQ ID NO: 1944 - RNA, 19 nt, Artificial Sequence
  Synthetic oligonucleotide
agaagcgacaauugggaua

SEQ ID NO: 1945 - RNA, 19 nt, Artificial Sequence
  Synthetic oligonucleotide
uaucccaauugucgcuucu

SEQ ID NO: 1946 - RNA, 19 nt, Artificial Sequence
  Synthetic oligonucleotide
gaagcgacaauugggauua

SEQ ID NO: 1947 - RNA, 19 nt, Artificial Sequence
  Synthetic oligonucleotide
uaaucccaauugucgcuuc

SEQ ID NO: 1948 - RNA, 19 nt, Artificial Sequence
  Synthetic oligonucleotide
agcgacaauugggauugua

SEQ ID NO: 1949 - RNA, 19 nt, Artificial Sequence
  Synthetic oligonucleotide
uacaaucccaauugucgcu

SEQ ID NO: 1950 - RNA, 19 nt, Artificial Sequence
  Synthetic oligonucleotide
gcgacaauugggauuguga

SEQ ID NO: 1951 - RNA, 19 nt, Artificial Sequence
  Synthetic oligonucleotide
ucacaaucccaauugucgc

SEQ ID NO: 1952 - RNA, 19 nt, Artificial Sequence
  Synthetic oligonucleotide
caauugggauuguggauga

SEQ ID NO: 1953 - RNA, 19 nt, Artificial Sequence
  Synthetic oligonucleotide
ucauccacaaucccaauug

SEQ ID NO: 1954 - RNA, 19 nt, Artificial Sequence
  Synthetic oligonucleotide
ugggauuguggauggcaua

SEQ ID NO: 1955 - RNA, 19 nt, Artificial Sequence
  Synthetic oligonucleotide
uaugccauccacaauccca

SEQ ID NO: 1956 - RNA, 19 nt, Artificial Sequence
  Synthetic oligonucleotide
gggauuguggauggcauua

SEQ ID NO: 1957 - RNA, 19 nt, Artificial Sequence
  Synthetic oligonucleotide
uaaugccauccacaauccc

SEQ ID NO: 1958 - RNA, 19 nt, Artificial Sequence
  Synthetic oligonucleotide
ggauuguggauggcauuua

SEQ ID NO: 1959 - RNA, 19 nt, Artificial Sequence
  Synthetic oligonucleotide
uaaaugccauccacaaucc

SEQ ID NO: 1960 - RNA, 19 nt, Artificial Sequence
  Synthetic oligonucleotide
gauuguggauggcauuuua

SEQ ID NO: 1961 - RNA, 19 nt, Artificial Sequence
  Synthetic oligonucleotide
uaaaaugccauccacaauc

SEQ ID NO: 1962 - RNA, 19 nt, Artificial Sequence
  Synthetic oligonucleotide
uguggauggcauuuucaca

SEQ ID NO: 1963 - RNA, 19 nt, Artificial Sequence
  Synthetic oligonucleotide
ugugaaaaugccauccaca

SEQ ID NO: 1964 - RNA, 19 nt, Artificial Sequence
  Synthetic oligonucleotide
guggauggcauuuucacaa

SEQ ID NO: 1965 - RNA, 19 nt, Artificial Sequence
  Synthetic oligonucleotide
uugugaaaaugccauccac

SEQ ID NO: 1966 - RNA, 19 nt, Artificial Sequence
  Synthetic oligonucleotide
ggauggcauuuucacaaga

SEQ ID NO: 1967 - RNA, 19 nt, Artificial Sequence
  Synthetic oligonucleotide
ucuugugaaaaugccaucc

SEQ ID NO: 1968 - RNA, 19 nt, Artificial Sequence
  Synthetic oligonucleotide
gauggcauuuucacaagga

SEQ ID NO: 1969 - RNA, 19 nt, Artificial Sequence
  Synthetic oligonucleotide
uccuugugaaaaugccauc

SEQ ID NO: 1970 - RNA, 19 nt, Artificial Sequence
  Synthetic oligonucleotide
uggcauuuucacaaggaua

SEQ ID NO: 1971 - RNA, 19 nt, Artificial Sequence
  Synthetic oligonucleotide
uauccuugugaaaaugcca

SEQ ID NO: 1972 - RNA, 19 nt, Artificial Sequence
  Synthetic oligonucleotide
ggcauuuucacaaggauga

SEQ ID NO: 1973 - RNA, 19 nt, Artificial Sequence
  Synthetic oligonucleotide
ucauccuugugaaaaugcc

SEQ ID NO: 1974 - RNA, 19 nt, Artificial Sequence
  Synthetic oligonucleotide
ggaugggugcugcagacaa

SEQ ID NO: 1975 - RNA, 19 nt, Artificial Sequence
  Synthetic oligonucleotide
uugucugcagcacccaucc

SEQ ID NO: 1976 - RNA, 19 nt, Artificial Sequence
  Synthetic oligonucleotide
gaugggugcugcagacaaa

SEQ ID NO: 1977 - RNA, 19 nt, Artificial Sequence
  Synthetic oligonucleotide
uuugucugcagcacccauc

SEQ ID NO: 1978 - RNA, 19 nt, Artificial Sequence
  Synthetic oligonucleotide
augggugcugcagacaaua

SEQ ID NO: 1979 - RNA, 19 nt, Artificial Sequence
  Synthetic oligonucleotide
uauugucugcagcacccau

SEQ ID NO: 1980 - RNA, 19 nt, Artificial Sequence
  Synthetic oligonucleotide
ugggugcugcagacaauaa

SEQ ID NO: 1981 - RNA, 19 nt, Artificial Sequence
  Synthetic oligonucleotide
uuauugucugcagcaccca

SEQ ID NO: 1982 - RNA, 19 nt, Artificial Sequence
  Synthetic oligonucleotide
gggugcugcagacaauaua

SEQ ID NO: 1983 - RNA, 19 nt, Artificial Sequence
  Synthetic oligonucleotide
uauauugucugcagcaccc

SEQ ID NO: 1984 - RNA, 19 nt, Artificial Sequence
  Synthetic oligonucleotide
gugcugcagacaauauaua

SEQ ID NO: 1985 - RNA, 19 nt, Artificial Sequence
  Synthetic oligonucleotide
uauauauugucugcagcac

SEQ ID NO: 1986 - RNA, 19 nt, Artificial Sequence
  Synthetic oligonucleotide
gcugcagacaauauauaua

SEQ ID NO: 1987 - RNA, 19 nt, Artificial Sequence
  Synthetic oligonucleotide
uauauauauugucugcagc

SEQ ID NO: 1988 - RNA, 19 nt, Artificial Sequence
  Synthetic oligonucleotide
cugcagacaauauauauaa

SEQ ID NO: 1989 - RNA, 19 nt, Artificial Sequence
  Synthetic oligonucleotide
uuauauauauugucugcag

SEQ ID NO: 1990 - RNA, 19 nt, Artificial Sequence
  Synthetic oligonucleotide
ugcagacaauauauauaaa

SEQ ID NO: 1991 - RNA, 19 nt, Artificial Sequence
  Synthetic oligonucleotide
uuuauauauauugucugca

SEQ ID NO: 1992 - RNA, 19 nt, Artificial Sequence
  Synthetic oligonucleotide
gacaauauauauaaaggaa

SEQ ID NO: 1993 - RNA, 19 nt, Artificial Sequence
  Synthetic oligonucleotide
uuccuuuauauauauuguc

SEQ ID NO: 1994 - RNA, 19 nt, Artificial Sequence
  Synthetic oligonucleotide
acaauauauauaaaggaca

SEQ ID NO: 1995 - RNA, 19 nt, Artificial Sequence
  Synthetic oligonucleotide
uguccuuuauauauauugu

SEQ ID NO: 1996 - RNA, 19 nt, Artificial Sequence
  Synthetic oligonucleotide
caauauauauaaaggacaa

SEQ ID NO: 1997 - RNA, 19 nt, Artificial Sequence
  Synthetic oligonucleotide
uuguccuuuauauauauug

SEQ ID NO: 1998 - RNA, 19 nt, Artificial Sequence
  Synthetic oligonucleotide
auauauaaaggacagagua

SEQ ID NO: 1999 - RNA, 19 nt, Artificial Sequence
  Synthetic oligonucleotide
uacucuguccuuuauauau

SEQ ID NO: 2000 - RNA, 19 nt, Artificial Sequence
  Synthetic oligonucleotide
uauauaaaggacagaguaa

SEQ ID NO: 2001 - RNA, 19 nt, Artificial Sequence
  Synthetic oligonucleotide
uuacucuguccuuuauaua

SEQ ID NO: 2002 - RNA, 19 nt, Artificial Sequence
  Synthetic oligonucleotide
uauaaaggacagaguacaa

SEQ ID NO: 2003 - RNA, 19 nt, Artificial Sequence
  Synthetic oligonucleotide
uuguacucuguccuuuaua

SEQ ID NO: 2004 - RNA, 19 nt, Artificial Sequence
  Synthetic oligonucleotide
auaaaggacagaguacaua

SEQ ID NO: 2005 - RNA, 19 nt, Artificial Sequence
  Synthetic oligonucleotide
uauguacucuguccuuuau

SEQ ID NO: 2006 - RNA, 19 nt, Artificial Sequence
  Synthetic oligonucleotide
uaaaggacagaguacauua

SEQ ID NO: 2007 - RNA, 19 nt, Artificial Sequence
  Synthetic oligonucleotide
uaauguacucuguccuuua

SEQ ID NO: 2008 - RNA, 19 nt, Artificial Sequence
  Synthetic oligonucleotide
aaaggacagaguacauuua

SEQ ID NO: 2009 - RNA, 19 nt, Artificial Sequence
  Synthetic oligonucleotide
uaaauguacucuguccuuu

SEQ ID NO: 2010 - RNA, 19 nt, Artificial Sequence
  Synthetic oligonucleotide
cagaguacauuuauggaaa

SEQ ID NO: 2011 - RNA, 19 nt, Artificial Sequence
  Synthetic oligonucleotide
uuuccauaaauguacucug

SEQ ID NO: 2012 - RNA, 19 nt, Artificial Sequence
  Synthetic oligonucleotide
agaguacauuuauggaaga

SEQ ID NO: 2013 - RNA, 19 nt, Artificial Sequence
  Synthetic oligonucleotide
ucuuccauaaauguacucu

SEQ ID NO: 2014 - RNA, 19 nt, Artificial Sequence
  Synthetic oligonucleotide
guacauuuauggaagaaca

SEQ ID NO: 2015 - RNA, 19 nt, Artificial Sequence
  Synthetic oligonucleotide
uguucuuccauaaauguac

SEQ ID NO: 2016 - RNA, 19 nt, Artificial Sequence
  Synthetic oligonucleotide
uacauuuauggaagaacua

SEQ ID NO: 2017 - RNA, 19 nt, Artificial Sequence
  Synthetic oligonucleotide
uaguucuuccauaaaugua

SEQ ID NO: 2018 - RNA, 19 nt, Artificial Sequence
  Synthetic oligonucleotide
auuuauggaagaacugaca

SEQ ID NO: 2019 - RNA, 19 nt, Artificial Sequence
  Synthetic oligonucleotide
ugucaguucuuccauaaau

SEQ ID NO: 2020 - RNA, 19 nt, Artificial Sequence
  Synthetic oligonucleotide
uuuauggaagaacugacua

SEQ ID NO: 2021 - RNA, 19 nt, Artificial Sequence
  Synthetic oligonucleotide
uagucaguucuuccauaaa

SEQ ID NO: 2022 - RNA, 19 nt, Artificial Sequence
  Synthetic oligonucleotide
uuauggaagaacugacuga

SEQ ID NO: 2023 - RNA, 19 nt, Artificial Sequence
  Synthetic oligonucleotide
ucagucaguucuuccauaa

SEQ ID NO: 2024 - RNA, 19 nt, Artificial Sequence
  Synthetic oligonucleotide
ggaagaacugacugacaca

SEQ ID NO: 2025 - RNA, 19 nt, Artificial Sequence
  Synthetic oligonucleotide
ugugucagucaguucuucc

SEQ ID NO: 2026 - RNA, 19 nt, Artificial Sequence
  Synthetic oligonucleotide
gaacugacugacacagcaa

SEQ ID NO: 2027 - RNA, 19 nt, Artificial Sequence
  Synthetic oligonucleotide
uugcugugucagucaguuc

SEQ ID NO: 2028 - RNA, 19 nt, Artificial Sequence
  Synthetic oligonucleotide
ugacacagcagaaauaaua

SEQ ID NO: 2029 - RNA, 19 nt, Artificial Sequence
  Synthetic oligonucleotide
uauuauuucugcuguguca

SEQ ID NO: 2030 - RNA, 19 nt, Artificial Sequence
  Synthetic oligonucleotide
gacacagcagaaauaauca

SEQ ID NO: 2031 - RNA, 19 nt, Artificial Sequence
  Synthetic oligonucleotide
ugauuauuucugcuguguc

SEQ ID NO: 2032 - RNA, 19 nt, Artificial Sequence
  Synthetic oligonucleotide
cagaaaagcaacaucacaa

SEQ ID NO: 2033 - RNA, 19 nt, Artificial Sequence
  Synthetic oligonucleotide
uugugauguugcuuuucug

SEQ ID NO: 2034 - RNA, 19 nt, Artificial Sequence
  Synthetic oligonucleotide
agaaaagcaacaucacaga

SEQ ID NO: 2035 - RNA, 19 nt, Artificial Sequence
  Synthetic oligonucleotide
ucugugauguugcuuuucu

SEQ ID NO: 2036 - RNA, 19 nt, Artificial Sequence
  Synthetic oligonucleotide
gcaacaucacaguccuuga

SEQ ID NO: 2037 - RNA, 19 nt, Artificial Sequence
  Synthetic oligonucleotide
ucaaggacugugauguugc

SEQ ID NO: 2038 - RNA, 19 nt, Artificial Sequence
  Synthetic oligonucleotide
caucacaguccuugguuaa

SEQ ID NO: 2039 - RNA, 19 nt, Artificial Sequence
  Synthetic oligonucleotide
uuaaccaaggacugugaug

SEQ ID NO: 2040 - RNA, 19 nt, Artificial Sequence
  Synthetic oligonucleotide
ucacaguccuugguuauca

SEQ ID NO: 2041 - RNA, 19 nt, Artificial Sequence
  Synthetic oligonucleotide
ugauaaccaaggacuguga

SEQ ID NO: 2042 - RNA, 19 nt, Artificial Sequence
  Synthetic oligonucleotide
cacaguccuugguuaucua

SEQ ID NO: 2043 - RNA, 19 nt, Artificial Sequence
  Synthetic oligonucleotide
uagauaaccaaggacugug

SEQ ID NO: 2044 - RNA, 19 nt, Artificial Sequence
  Synthetic oligonucleotide
caguccuugguuaucuuga

SEQ ID NO: 2045 - RNA, 19 nt, Artificial Sequence
  Synthetic oligonucleotide
ucaagauaaccaaggacug

SEQ ID NO: 2046 - RNA, 19 nt, Artificial Sequence
  Synthetic oligonucleotide
uccuugguuaucuuggaua

SEQ ID NO: 2047 - RNA, 19 nt, Artificial Sequence
  Synthetic oligonucleotide
uauccaagauaaccaagga

SEQ ID NO: 2048 - RNA, 19 nt, Artificial Sequence
  Synthetic oligonucleotide
ccuugguuaucuuggauga

SEQ ID NO: 2049 - RNA, 19 nt, Artificial Sequence
  Synthetic oligonucleotide
ucauccaagauaaccaagg

SEQ ID NO: 2050 - RNA, 19 nt, Artificial Sequence
  Synthetic oligonucleotide
gguuaucuuggaugaacua

SEQ ID NO: 2051 - RNA, 19 nt, Artificial Sequence
  Synthetic oligonucleotide
uaguucauccaagauaacc

SEQ ID NO: 2052 - RNA, 19 nt, Artificial Sequence
  Synthetic oligonucleotide
guuaucuuggaugaacuaa

SEQ ID NO: 2053 - RNA, 19 nt, Artificial Sequence
  Synthetic oligonucleotide
uuaguucauccaagauaac

SEQ ID NO: 2054 - RNA, 19 nt, Artificial Sequence
  Synthetic oligonucleotide
aucuuggaugaacuaggaa

SEQ ID NO: 2055 - RNA, 19 nt, Artificial Sequence
  Synthetic oligonucleotide
uuccuaguucauccaagau

SEQ ID NO: 2056 - RNA, 19 nt, Artificial Sequence
  Synthetic oligonucleotide
ucuuggaugaacuaggaaa

SEQ ID NO: 2057 - RNA, 19 nt, Artificial Sequence
  Synthetic oligonucleotide
uuuccuaguucauccaaga

SEQ ID NO: 2058 - RNA, 19 nt, Artificial Sequence
  Synthetic oligonucleotide
cuuggaugaacuaggaaga

SEQ ID NO: 2059 - RNA, 19 nt, Artificial Sequence
  Synthetic oligonucleotide
ucuuccuaguucauccaag

SEQ ID NO: 2060 - RNA, 19 nt, Artificial Sequence
  Synthetic oligonucleotide
uuggaugaacuaggaagaa

SEQ ID NO: 2061 - RNA, 19 nt, Artificial Sequence
  Synthetic oligonucleotide
uucuuccuaguucauccaa

SEQ ID NO: 2062 - RNA, 19 nt, Artificial Sequence
  Synthetic oligonucleotide
aagagggacgagcacucaa

SEQ ID NO: 2063 - RNA, 19 nt, Artificial Sequence
  Synthetic oligonucleotide
uugagugcucgucccucuu

SEQ ID NO: 2064 - RNA, 19 nt, Artificial Sequence
  Synthetic oligonucleotide
agagggacgagcacucaua

SEQ ID NO: 2065 - RNA, 19 nt, Artificial Sequence
  Synthetic oligonucleotide
uaugagugcucgucccucu

SEQ ID NO: 2066 - RNA, 19 nt, Artificial Sequence
  Synthetic oligonucleotide
agggacgagcacucaugaa

SEQ ID NO: 2067 - RNA, 19 nt, Artificial Sequence
  Synthetic oligonucleotide
uucaugagugcucgucccu

SEQ ID NO: 2068 - RNA, 19 nt, Artificial Sequence
  Synthetic oligonucleotide
gggacgagcacucaugaua

SEQ ID NO: 2069 - RNA, 19 nt, Artificial Sequence
  Synthetic oligonucleotide
uaucaugagugcucguccc

SEQ ID NO: 2070 - RNA, 19 nt, Artificial Sequence
  Synthetic oligonucleotide
ggacgagcacucaugauga

SEQ ID NO: 2071 - RNA, 19 nt, Artificial Sequence
  Synthetic oligonucleotide
ucaucaugagugcucgucc

SEQ ID NO: 2072 - RNA, 19 nt, Artificial Sequence
  Synthetic oligonucleotide
acgagcacucaugauggaa

SEQ ID NO: 2073 - RNA, 19 nt, Artificial Sequence
  Synthetic oligonucleotide
uuccaucaugagugcucgu

SEQ ID NO: 2074 - RNA, 19 nt, Artificial Sequence
  Synthetic oligonucleotide
cgagcacucaugauggaaa

SEQ ID NO: 2075 - RNA, 19 nt, Artificial Sequence
  Synthetic oligonucleotide
uuuccaucaugagugcucg

SEQ ID NO: 2076 - RNA, 19 nt, Artificial Sequence
  Synthetic oligonucleotide
gagcacucaugauggaaua

SEQ ID NO: 2077 - RNA, 19 nt, Artificial Sequence
  Synthetic oligonucleotide
uauuccaucaugagugcuc

SEQ ID NO: 2078 - RNA, 19 nt, Artificial Sequence
  Synthetic oligonucleotide
cacucaugauggaauugca

SEQ ID NO: 2079 - RNA, 19 nt, Artificial Sequence
  Synthetic oligonucleotide
ugcaauuccaucaugagug

SEQ ID NO: 2080 - RNA, 19 nt, Artificial Sequence
  Synthetic oligonucleotide
acucaugauggaauugcca

SEQ ID NO: 2081 - RNA, 19 nt, Artificial Sequence
  Synthetic oligonucleotide
uggcaauuccaucaugagu

SEQ ID NO: 2082 - RNA, 19 nt, Artificial Sequence
  Synthetic oligonucleotide
cucaugauggaauugccaa

SEQ ID NO: 2083 - RNA, 19 nt, Artificial Sequence
  Synthetic oligonucleotide
uuggcaauuccaucaugag

SEQ ID NO: 2084 - RNA, 19 nt, Artificial Sequence
  Synthetic oligonucleotide
ucaugauggaauugccaua

SEQ ID NO: 2085 - RNA, 19 nt, Artificial Sequence
  Synthetic oligonucleotide
uauggcaauuccaucauga

SEQ ID NO: 2086 - RNA, 19 nt, Artificial Sequence
  Synthetic oligonucleotide
gaauugccauugccuauga

SEQ ID NO: 2087 - RNA, 19 nt, Artificial Sequence
  Synthetic oligonucleotide
ucauaggcaauggcaauuc

SEQ ID NO: 2088 - RNA, 19 nt, Artificial Sequence
  Synthetic oligonucleotide
auugccauugccuaugcua

SEQ ID NO: 2089 - RNA, 19 nt, Artificial Sequence
  Synthetic oligonucleotide
uagcauaggcaauggcaau

SEQ ID NO: 2090 - RNA, 19 nt, Artificial Sequence
  Synthetic oligonucleotide
uugccauugccuaugcuaa

SEQ ID NO: 2091 - RNA, 19 nt, Artificial Sequence
  Synthetic oligonucleotide
uuagcauaggcaauggcaa

SEQ ID NO: 2092 - RNA, 19 nt, Artificial Sequence
  Synthetic oligonucleotide
ugccauugccuaugcuaca

SEQ ID NO: 2093 - RNA, 19 nt, Artificial Sequence
  Synthetic oligonucleotide
uguagcauaggcaauggca

SEQ ID NO: 2094 - RNA, 19 nt, Artificial Sequence
  Synthetic oligonucleotide
cauugccuaugcuacacua

SEQ ID NO: 2095 - RNA, 19 nt, Artificial Sequence
  Synthetic oligonucleotide
uaguguagcauaggcaaug

SEQ ID NO: 2096 - RNA, 19 nt, Artificial Sequence
  Synthetic oligonucleotide
auugccuaugcuacacuua

SEQ ID NO: 2097 - RNA, 19 nt, Artificial Sequence
  Synthetic oligonucleotide
uaaguguagcauaggcaau

SEQ ID NO: 2098 - RNA, 19 nt, Artificial Sequence
  Synthetic oligonucleotide
uugccuaugcuacacuuga

SEQ ID NO: 2099 - RNA, 19 nt, Artificial Sequence
  Synthetic oligonucleotide
ucaaguguagcauaggcaa

SEQ ID NO: 2100 - RNA, 19 nt, Artificial Sequence
  Synthetic oligonucleotide
gccuaugcuacacuugaga

SEQ ID NO: 2101 - RNA, 19 nt, Artificial Sequence
  Synthetic oligonucleotide
ucucaaguguagcauaggc

SEQ ID NO: 2102 - RNA, 19 nt, Artificial Sequence
  Synthetic oligonucleotide
ccuaugcuacacuugagua

SEQ ID NO: 2103 - RNA, 19 nt, Artificial Sequence
  Synthetic oligonucleotide
uacucaaguguagcauagg

SEQ ID NO: 2104 - RNA, 19 nt, Artificial Sequence
  Synthetic oligonucleotide
cuaugcuacacuugaguaa

SEQ ID NO: 2105 - RNA, 19 nt, Artificial Sequence
  Synthetic oligonucleotide
uuacucaaguguagcauag

SEQ ID NO: 2106 - RNA, 19 nt, Artificial Sequence
  Synthetic oligonucleotide
uaugcuacacuugaguaua

SEQ ID NO: 2107 - RNA, 19 nt, Artificial Sequence
  Synthetic oligonucleotide
uauacucaaguguagcaua

SEQ ID NO: 2108 - RNA, 19 nt, Artificial Sequence
  Synthetic oligonucleotide
augcuacacuugaguauua

SEQ ID NO: 2109 - RNA, 19 nt, Artificial Sequence
  Synthetic oligonucleotide
uaauacucaaguguagcau

SEQ ID NO: 2110 - RNA, 19 nt, Artificial Sequence
  Synthetic oligonucleotide
gcuacacuugaguauuuca

SEQ ID NO: 2111 - RNA, 19 nt, Artificial Sequence
  Synthetic oligonucleotide
ugaaauacucaaguguagc

SEQ ID NO: 2112 - RNA, 19 nt, Artificial Sequence
  Synthetic oligonucleotide
cuacacuugaguauuucaa

SEQ ID NO: 2113 - RNA, 19 nt, Artificial Sequence
  Synthetic oligonucleotide
uugaaauacucaaguguag

SEQ ID NO: 2114 - RNA, 19 nt, Artificial Sequence
  Synthetic oligonucleotide
cuugaguauuucaucagaa

SEQ ID NO: 2115 - RNA, 19 nt, Artificial Sequence
  Synthetic oligonucleotide
uucugaugaaauacucaag

SEQ ID NO: 2116 - RNA, 19 nt, Artificial Sequence
  Synthetic oligonucleotide
uugaguauuucaucagaga

SEQ ID NO: 2117 - RNA, 19 nt, Artificial Sequence
  Synthetic oligonucleotide
ucucugaugaaauacucaa

SEQ ID NO: 2118 - RNA, 19 nt, Artificial Sequence
  Synthetic oligonucleotide
ugaguauuucaucagagaa

SEQ ID NO: 2119 - RNA, 19 nt, Artificial Sequence
  Synthetic oligonucleotide
uucucugaugaaauacuca

SEQ ID NO: 2120 - RNA, 19 nt, Artificial Sequence
  Synthetic oligonucleotide
gaguauuucaucagagaua

SEQ ID NO: 2121 - RNA, 19 nt, Artificial Sequence
  Synthetic oligonucleotide
uaucucugaugaaauacuc

SEQ ID NO: 2122 - RNA, 19 nt, Artificial Sequence
  Synthetic oligonucleotide
uucaucagagaugugaaaa

SEQ ID NO: 2123 - RNA, 19 nt, Artificial Sequence
  Synthetic oligonucleotide
uuuucacaucucugaugaa

SEQ ID NO: 2124 - RNA, 19 nt, Artificial Sequence
  Synthetic oligonucleotide
caucagagaugugaaauca

SEQ ID NO: 2125 - RNA, 19 nt, Artificial Sequence
  Synthetic oligonucleotide
ugauuucacaucucugaug

SEQ ID NO: 2126 - RNA, 19 nt, Artificial Sequence
  Synthetic oligonucleotide
agagaugugaaauccuuaa

SEQ ID NO: 2127 - RNA, 19 nt, Artificial Sequence
  Synthetic oligonucleotide
uuaaggauuucacaucucu

SEQ ID NO: 2128 - RNA, 19 nt, Artificial Sequence
  Synthetic oligonucleotide
gagaugugaaauccuuaaa

SEQ ID NO: 2129 - RNA, 19 nt, Artificial Sequence
  Synthetic oligonucleotide
uuuaaggauuucacaucuc

SEQ ID NO: 2130 - RNA, 19 nt, Artificial Sequence
  Synthetic oligonucleotide
agaugugaaauccuuaaca

SEQ ID NO: 2131 - RNA, 19 nt, Artificial Sequence
  Synthetic oligonucleotide
uguuaaggauuucacaucu

SEQ ID NO: 2132 - RNA, 19 nt, Artificial Sequence
  Synthetic oligonucleotide
gaugugaaauccuuaacca

SEQ ID NO: 2133 - RNA, 19 nt, Artificial Sequence
  Synthetic oligonucleotide
ugguuaaggauuucacauc

SEQ ID NO: 2134 - RNA, 19 nt, Artificial Sequence
  Synthetic oligonucleotide
ugugaaauccuuaacccua

SEQ ID NO: 2135 - RNA, 19 nt, Artificial Sequence
  Synthetic oligonucleotide
uaggguuaaggauuucaca

SEQ ID NO: 2136 - RNA, 19 nt, Artificial Sequence
  Synthetic oligonucleotide
auccuuaacccuguuugua

SEQ ID NO: 2137 - RNA, 19 nt, Artificial Sequence
  Synthetic oligonucleotide
uacaaacaggguuaaggau

SEQ ID NO: 2138 - RNA, 19 nt, Artificial Sequence
  Synthetic oligonucleotide
ccuuaacccuguuugucaa

SEQ ID NO: 2139 - RNA, 19 nt, Artificial Sequence
  Synthetic oligonucleotide
uugacaaacaggguuaagg

SEQ ID NO: 2140 - RNA, 19 nt, Artificial Sequence
  Synthetic oligonucleotide
cuuaacccuguuugucaca

SEQ ID NO: 2141 - RNA, 19 nt, Artificial Sequence
  Synthetic oligonucleotide
ugugacaaacaggguuaag

SEQ ID NO: 2142 - RNA, 19 nt, Artificial Sequence
  Synthetic oligonucleotide
acccuguuugucacccaua

SEQ ID NO: 2143 - RNA, 19 nt, Artificial Sequence
  Synthetic oligonucleotide
uaugggugacaaacagggu

SEQ ID NO: 2144 - RNA, 19 nt, Artificial Sequence
  Synthetic oligonucleotide
cccuguuugucacccauua

SEQ ID NO: 2145 - RNA, 19 nt, Artificial Sequence
  Synthetic oligonucleotide
uaaugggugacaaacaggg

SEQ ID NO: 2146 - RNA, 19 nt, Artificial Sequence
  Synthetic oligonucleotide
cuguuugucacccauuaua

SEQ ID NO: 2147 - RNA, 19 nt, Artificial Sequence
  Synthetic oligonucleotide
uauaaugggugacaaacag

SEQ ID NO: 2148 - RNA, 19 nt, Artificial Sequence
  Synthetic oligonucleotide
guuugucacccauuaucca

SEQ ID NO: 2149 - RNA, 19 nt, Artificial Sequence
  Synthetic oligonucleotide
uggauaaugggugacaaac

SEQ ID NO: 2150 - RNA, 19 nt, Artificial Sequence
  Synthetic oligonucleotide
uuugucacccauuauccga

SEQ ID NO: 2151 - RNA, 19 nt, Artificial Sequence
  Synthetic oligonucleotide
ucggauaaugggugacaaa

SEQ ID NO: 2152 - RNA, 19 nt, Artificial Sequence
  Synthetic oligonucleotide
cccauuauccgccaguuua

SEQ ID NO: 2153 - RNA, 19 nt, Artificial Sequence
  Synthetic oligonucleotide
uaaacuggcggauaauggg

SEQ ID NO: 2154 - RNA, 19 nt, Artificial Sequence
  Synthetic oligonucleotide
ccauuauccgccaguuuga

SEQ ID NO: 2155 - RNA, 19 nt, Artificial Sequence
  Synthetic oligonucleotide
ucaaacuggcggauaaugg

SEQ ID NO: 2156 - RNA, 19 nt, Artificial Sequence
  Synthetic oligonucleotide
uuauccgccaguuugugaa

SEQ ID NO: 2157 - RNA, 19 nt, Artificial Sequence
  Synthetic oligonucleotide
uucacaaacuggcggauaa

SEQ ID NO: 2158 - RNA, 19 nt, Artificial Sequence
  Synthetic oligonucleotide
uauccgccaguuugugaaa

SEQ ID NO: 2159 - RNA, 19 nt, Artificial Sequence
  Synthetic oligonucleotide
uuucacaaacuggcggaua

SEQ ID NO: 2160 - RNA, 19 nt, Artificial Sequence
  Synthetic oligonucleotide
auccgccaguuugugaaca

SEQ ID NO: 2161 - RNA, 19 nt, Artificial Sequence
  Synthetic oligonucleotide
uguucacaaacuggcggau

SEQ ID NO: 2162 - RNA, 19 nt, Artificial Sequence
  Synthetic oligonucleotide
ccgccaguuugugaacuaa

SEQ ID NO: 2163 - RNA, 19 nt, Artificial Sequence
  Synthetic oligonucleotide
uuaguucacaaacuggcgg

SEQ ID NO: 2164 - RNA, 19 nt, Artificial Sequence
  Synthetic oligonucleotide
cgccaguuugugaacuaga

SEQ ID NO: 2165 - RNA, 19 nt, Artificial Sequence
  Synthetic oligonucleotide
ucuaguucacaaacuggcg

SEQ ID NO: 2166 - RNA, 19 nt, Artificial Sequence
  Synthetic oligonucleotide
gccaguuugugaacuagaa

SEQ ID NO: 2167 - RNA, 19 nt, Artificial Sequence
  Synthetic oligonucleotide
uucuaguucacaaacuggc

SEQ ID NO: 2168 - RNA, 19 nt, Artificial Sequence
  Synthetic oligonucleotide
ccaguuugugaacuagaaa

SEQ ID NO: 2169 - RNA, 19 nt, Artificial Sequence
  Synthetic oligonucleotide
uuucuaguucacaaacugg

SEQ ID NO: 2170 - RNA, 19 nt, Artificial Sequence
  Synthetic oligonucleotide
caguuugugaacuagaaaa

SEQ ID NO: 2171 - RNA, 19 nt, Artificial Sequence
  Synthetic oligonucleotide
uuuucuaguucacaaacug

SEQ ID NO: 2172 - RNA, 19 nt, Artificial Sequence
  Synthetic oligonucleotide
ucacaccagguggggaaua

SEQ ID NO: 2173 - RNA, 19 nt, Artificial Sequence
  Synthetic oligonucleotide
uauuccccaccugguguga

SEQ ID NO: 2174 - RNA, 19 nt, Artificial Sequence
  Synthetic oligonucleotide
cacaccagguggggaauua

SEQ ID NO: 2175 - RNA, 19 nt, Artificial Sequence
  Synthetic oligonucleotide
uaauuccccaccuggugug

SEQ ID NO: 2176 - RNA, 19 nt, Artificial Sequence
  Synthetic oligonucleotide
acaccagguggggaauuaa

SEQ ID NO: 2177 - RNA, 19 nt, Artificial Sequence
  Synthetic oligonucleotide
uuaauuccccaccuggugu

SEQ ID NO: 2178 - RNA, 19 nt, Artificial Sequence
  Synthetic oligonucleotide
caccagguggggaauuaca

SEQ ID NO: 2179 - RNA, 19 nt, Artificial Sequence
  Synthetic oligonucleotide
uguaauuccccaccuggug

SEQ ID NO: 2180 - RNA, 19 nt, Artificial Sequence
  Synthetic oligonucleotide
accagguggggaauuacca

SEQ ID NO: 2181 - RNA, 19 nt, Artificial Sequence
  Synthetic oligonucleotide
ugguaauuccccaccuggu

SEQ ID NO: 2182 - RNA, 19 nt, Artificial Sequence
  Synthetic oligonucleotide
ccagguggggaauuaccaa

SEQ ID NO: 2183 - RNA, 19 nt, Artificial Sequence
  Synthetic oligonucleotide
uugguaauuccccaccugg

SEQ ID NO: 2184 - RNA, 19 nt, Artificial Sequence
  Synthetic oligonucleotide
agguggggaauuaccacaa

SEQ ID NO: 2185 - RNA, 19 nt, Artificial Sequence
  Synthetic oligonucleotide
uugugguaauuccccaccu

SEQ ID NO: 2186 - RNA, 19 nt, Artificial Sequence
  Synthetic oligonucleotide
gguggggaauuaccacaua

SEQ ID NO: 2187 - RNA, 19 nt, Artificial Sequence
  Synthetic oligonucleotide
uaugugguaauuccccacc

SEQ ID NO: 2188 - RNA, 19 nt, Artificial Sequence
  Synthetic oligonucleotide
guggggaauuaccacauga

SEQ ID NO: 2189 - RNA, 19 nt, Artificial Sequence
  Synthetic oligonucleotide
ucaugugguaauuccccac

SEQ ID NO: 2190 - RNA, 19 nt, Artificial Sequence
  Synthetic oligonucleotide
gggaauuaccacaugggaa

SEQ ID NO: 2191 - RNA, 19 nt, Artificial Sequence
  Synthetic oligonucleotide
uucccaugugguaauuccc

SEQ ID NO: 2192 - RNA, 19 nt, Artificial Sequence
  Synthetic oligonucleotide
ggaauuaccacaugggaua

SEQ ID NO: 2193 - RNA, 19 nt, Artificial Sequence
  Synthetic oligonucleotide
uaucccaugugguaauucc

SEQ ID NO: 2194 - RNA, 19 nt, Artificial Sequence
  Synthetic oligonucleotide
gaauuaccacaugggauua

SEQ ID NO: 2195 - RNA, 19 nt, Artificial Sequence
  Synthetic oligonucleotide
uaaucccaugugguaauuc

SEQ ID NO: 2196 - RNA, 19 nt, Artificial Sequence
  Synthetic oligonucleotide
aauuaccacaugggauuca

SEQ ID NO: 2197 - RNA, 19 nt, Artificial Sequence
  Synthetic oligonucleotide
ugaaucccaugugguaauu

SEQ ID NO: 2198 - RNA, 19 nt, Artificial Sequence
  Synthetic oligonucleotide
auuaccacaugggauucua

SEQ ID NO: 2199 - RNA, 19 nt, Artificial Sequence
  Synthetic oligonucleotide
uagaaucccaugugguaau

SEQ ID NO: 2200 - RNA, 19 nt, Artificial Sequence
  Synthetic oligonucleotide
uaccacaugggauucuuga

SEQ ID NO: 2201 - RNA, 19 nt, Artificial Sequence
  Synthetic oligonucleotide
ucaagaaucccauguggua

SEQ ID NO: 2202 - RNA, 19 nt, Artificial Sequence
  Synthetic oligonucleotide
ccacaugggauucuuggua

SEQ ID NO: 2203 - RNA, 19 nt, Artificial Sequence
  Synthetic oligonucleotide
uaccaagaaucccaugugg

SEQ ID NO: 2204 - RNA, 19 nt, Artificial Sequence
  Synthetic oligonucleotide
caugggauucuuggucaga

SEQ ID NO: 2205 - RNA, 19 nt, Artificial Sequence
  Synthetic oligonucleotide
ucugaccaagaaucccaug

SEQ ID NO: 2206 - RNA, 19 nt, Artificial Sequence
  Synthetic oligonucleotide
gggauucuuggucagugaa

SEQ ID NO: 2207 - RNA, 19 nt, Artificial Sequence
  Synthetic oligonucleotide
uucacugaccaagaauccc

SEQ ID NO: 2208 - RNA, 19 nt, Artificial Sequence
  Synthetic oligonucleotide
ggauucuuggucagugaga

SEQ ID NO: 2209 - RNA, 19 nt, Artificial Sequence
  Synthetic oligonucleotide
ucucacugaccaagaaucc

SEQ ID NO: 2210 - RNA, 19 nt, Artificial Sequence
  Synthetic oligonucleotide
gucagugaggaugaaagca

SEQ ID NO: 2211 - RNA, 19 nt, Artificial Sequence
  Synthetic oligonucleotide
ugcuuucauccucacugac

SEQ ID NO: 2212 - RNA, 19 nt, Artificial Sequence
  Synthetic oligonucleotide
cagugaggaugaaagcaaa

SEQ ID NO: 2213 - RNA, 19 nt, Artificial Sequence
  Synthetic oligonucleotide
uuugcuuucauccucacug

SEQ ID NO: 2214 - RNA, 19 nt, Artificial Sequence
  Synthetic oligonucleotide
gaugaaagcaaacuggaua

SEQ ID NO: 2215 - RNA, 19 nt, Artificial Sequence
  Synthetic oligonucleotide
uauccaguuugcuuucauc

SEQ ID NO: 2216 - RNA, 19 nt, Artificial Sequence
  Synthetic oligonucleotide
gaaagcaaacuggauccaa

SEQ ID NO: 2217 - RNA, 19 nt, Artificial Sequence
  Synthetic oligonucleotide
uuggauccaguuugcuuuc

SEQ ID NO: 2218 - RNA, 19 nt, Artificial Sequence
  Synthetic oligonucleotide
ccaggcgcagcagaacaaa

SEQ ID NO: 2219 - RNA, 19 nt, Artificial Sequence
  Synthetic oligonucleotide
uuuguucugcugcgccugg

SEQ ID NO: 2220 - RNA, 19 nt, Artificial Sequence
  Synthetic oligonucleotide
caggcgcagcagaacaaga

SEQ ID NO: 2221 - RNA, 19 nt, Artificial Sequence
  Synthetic oligonucleotide
ucuuguucugcugcgccug

SEQ ID NO: 2222 - RNA, 19 nt, Artificial Sequence
  Synthetic oligonucleotide
ggcgcagcagaacaaguca

SEQ ID NO: 2223 - RNA, 19 nt, Artificial Sequence
  Synthetic oligonucleotide
ugacuuguucugcugcgcc

SEQ ID NO: 2224 - RNA, 19 nt, Artificial Sequence
  Synthetic oligonucleotide
gcgcagcagaacaagucca

SEQ ID NO: 2225 - RNA, 19 nt, Artificial Sequence
  Synthetic oligonucleotide
uggacuuguucugcugcgc

SEQ ID NO: 2226 - RNA, 19 nt, Artificial Sequence
  Synthetic oligonucleotide
gcagcagaacaagucccua

SEQ ID NO: 2227 - RNA, 19 nt, Artificial Sequence
  Synthetic oligonucleotide
uagggacuuguucugcugc

SEQ ID NO: 2228 - RNA, 19 nt, Artificial Sequence
  Synthetic oligonucleotide
agaacaagucccugauuua

SEQ ID NO: 2229 - RNA, 19 nt, Artificial Sequence
  Synthetic oligonucleotide
uaaaucagggacuuguucu

SEQ ID NO: 2230 - RNA, 19 nt, Artificial Sequence
  Synthetic oligonucleotide
aacaagucccugauuuuga

SEQ ID NO: 2231 - RNA, 19 nt, Artificial Sequence
  Synthetic oligonucleotide
ucaaaaucagggacuuguu

SEQ ID NO: 2232 - RNA, 19 nt, Artificial Sequence
  Synthetic oligonucleotide
gucccugauuuugucacca

SEQ ID NO: 2233 - RNA, 19 nt, Artificial Sequence
  Synthetic oligonucleotide
uggugacaaaaucagggac

SEQ ID NO: 2234 - RNA, 19 nt, Artificial Sequence
  Synthetic oligonucleotide
cccugauuuugucaccuua

SEQ ID NO: 2235 - RNA, 19 nt, Artificial Sequence
  Synthetic oligonucleotide
uaaggugacaaaaucaggg

SEQ ID NO: 2236 - RNA, 19 nt, Artificial Sequence
  Synthetic oligonucleotide
ccugauuuugucaccuuca

SEQ ID NO: 2237 - RNA, 19 nt, Artificial Sequence
  Synthetic oligonucleotide
ugaaggugacaaaaucagg

SEQ ID NO: 2238 - RNA, 19 nt, Artificial Sequence
  Synthetic oligonucleotide
ugauuuugucaccuuccua

SEQ ID NO: 2239 - RNA, 19 nt, Artificial Sequence
  Synthetic oligonucleotide
uaggaaggugacaaaauca

SEQ ID NO: 2240 - RNA, 19 nt, Artificial Sequence
  Synthetic oligonucleotide
auuuugucaccuuccuuua

SEQ ID NO: 2241 - RNA, 19 nt, Artificial Sequence
  Synthetic oligonucleotide
uaaaggaaggugacaaaau

SEQ ID NO: 2242 - RNA, 19 nt, Artificial Sequence
  Synthetic oligonucleotide
uuuugucaccuuccuuuaa

SEQ ID NO: 2243 - RNA, 19 nt, Artificial Sequence
  Synthetic oligonucleotide
uuaaaggaaggugacaaaa

SEQ ID NO: 2244 - RNA, 19 nt, Artificial Sequence
  Synthetic oligonucleotide
ugucaccuuccuuuaccaa

SEQ ID NO: 2245 - RNA, 19 nt, Artificial Sequence
  Synthetic oligonucleotide
uugguaaaggaaggugaca

SEQ ID NO: 2246 - RNA, 19 nt, Artificial Sequence
  Synthetic oligonucleotide
ucaccuuccuuuaccaaaa

SEQ ID NO: 2247 - RNA, 19 nt, Artificial Sequence
  Synthetic oligonucleotide
uuuugguaaaggaagguga

SEQ ID NO: 2248 - RNA, 19 nt, Artificial Sequence
  Synthetic oligonucleotide
uuccuuuaccaaauaacua

SEQ ID NO: 2249 - RNA, 19 nt, Artificial Sequence
  Synthetic oligonucleotide
uaguuauuugguaaaggaa

SEQ ID NO: 2250 - RNA, 19 nt, Artificial Sequence
  Synthetic oligonucleotide
uccuuuaccaaauaacuaa

SEQ ID NO: 2251 - RNA, 19 nt, Artificial Sequence
  Synthetic oligonucleotide
uuaguuauuugguaaagga

SEQ ID NO: 2252 - RNA, 19 nt, Artificial Sequence
  Synthetic oligonucleotide
ccuuuaccaaauaacuaga

SEQ ID NO: 2253 - RNA, 19 nt, Artificial Sequence
  Synthetic oligonucleotide
ucuaguuauuugguaaagg

SEQ ID NO: 2254 - RNA, 19 nt, Artificial Sequence
  Synthetic oligonucleotide
cuuuaccaaauaacuagaa

SEQ ID NO: 2255 - RNA, 19 nt, Artificial Sequence
  Synthetic oligonucleotide
uucuaguuauuugguaaag

SEQ ID NO: 2256 - RNA, 19 nt, Artificial Sequence
  Synthetic oligonucleotide
uaccaaauaacuagaggaa

SEQ ID NO: 2257 - RNA, 19 nt, Artificial Sequence
  Synthetic oligonucleotide
uuccucuaguuauuuggua

SEQ ID NO: 2258 - RNA, 19 nt, Artificial Sequence
  Synthetic oligonucleotide
caaauaacuagaggaauua

SEQ ID NO: 2259 - RNA, 19 nt, Artificial Sequence
  Synthetic oligonucleotide
uaauuccucuaguuauuug

SEQ ID NO: 2260 - RNA, 19 nt, Artificial Sequence
  Synthetic oligonucleotide
uaacuagaggaauugcaga

SEQ ID NO: 2261 - RNA, 19 nt, Artificial Sequence
  Synthetic oligonucleotide
ucugcaauuccucuaguua

SEQ ID NO: 2262 - RNA, 19 nt, Artificial Sequence
  Synthetic oligonucleotide
cuagaggaauugcagcaaa

SEQ ID NO: 2263 - RNA, 19 nt, Artificial Sequence
  Synthetic oligonucleotide
uuugcugcaauuccucuag

SEQ ID NO: 2264 - RNA, 19 nt, Artificial Sequence
  Synthetic oligonucleotide
ggaauugcagcaaggagua

SEQ ID NO: 2265 - RNA, 19 nt, Artificial Sequence
  Synthetic oligonucleotide
uacuccuugcugcaauucc

SEQ ID NO: 2266 - RNA, 19 nt, Artificial Sequence
  Synthetic oligonucleotide
gaauugcagcaaggaguua

SEQ ID NO: 2267 - RNA, 19 nt, Artificial Sequence
  Synthetic oligonucleotide
uaacuccuugcugcaauuc

SEQ ID NO: 2268 - RNA, 19 nt, Artificial Sequence
  Synthetic oligonucleotide
auugcagcaaggaguuaua

SEQ ID NO: 2269 - RNA, 19 nt, Artificial Sequence
  Synthetic oligonucleotide
uauaacuccuugcugcaau

SEQ ID NO: 2270 - RNA, 19 nt, Artificial Sequence
  Synthetic oligonucleotide
uugcagcaaggaguuauga

SEQ ID NO: 2271 - RNA, 19 nt, Artificial Sequence
  Synthetic oligonucleotide
ucauaacuccuugcugcaa

SEQ ID NO: 2272 - RNA, 19 nt, Artificial Sequence
  Synthetic oligonucleotide
gcaaggaguuauggauuaa

SEQ ID NO: 2273 - RNA, 19 nt, Artificial Sequence
  Synthetic oligonucleotide
uuaauccauaacuccuugc

SEQ ID NO: 2274 - RNA, 19 nt, Artificial Sequence
  Synthetic oligonucleotide
aaggaguuauggauuaaaa

SEQ ID NO: 2275 - RNA, 19 nt, Artificial Sequence
  Synthetic oligonucleotide
uuuuaauccauaacuccuu

SEQ ID NO: 2276 - RNA, 19 nt, Artificial Sequence
  Synthetic oligonucleotide
aggaguuauggauuaaaua

SEQ ID NO: 2277 - RNA, 19 nt, Artificial Sequence
  Synthetic oligonucleotide
uauuuaauccauaacuccu

SEQ ID NO: 2278 - RNA, 19 nt, Artificial Sequence
  Synthetic oligonucleotide
guuauggauuaaaugugga

SEQ ID NO: 2279 - RNA, 19 nt, Artificial Sequence
  Synthetic oligonucleotide
uccacauuuaauccauaac

SEQ ID NO: 2280 - RNA, 19 nt, Artificial Sequence
  Synthetic oligonucleotide
uuauggauuaaauguggca

SEQ ID NO: 2281 - RNA, 19 nt, Artificial Sequence
  Synthetic oligonucleotide
ugccacauuuaauccauaa

SEQ ID NO: 2282 - RNA, 19 nt, Artificial Sequence
  Synthetic oligonucleotide
uauggauuaaauguggcua

SEQ ID NO: 2283 - RNA, 19 nt, Artificial Sequence
  Synthetic oligonucleotide
uagccacauuuaauccaua

SEQ ID NO: 2284 - RNA, 19 nt, Artificial Sequence
  Synthetic oligonucleotide
auggauuaaauguggcuaa

SEQ ID NO: 2285 - RNA, 19 nt, Artificial Sequence
  Synthetic oligonucleotide
uuagccacauuuaauccau

SEQ ID NO: 2286 - RNA, 19 nt, Artificial Sequence
  Synthetic oligonucleotide
uggauuaaauguggcuaaa

SEQ ID NO: 2287 - RNA, 19 nt, Artificial Sequence
  Synthetic oligonucleotide
uuuagccacauuuaaucca

SEQ ID NO: 2288 - RNA, 19 nt, Artificial Sequence
  Synthetic oligonucleotide
gauuaaauguggcuaaaca

SEQ ID NO: 2289 - RNA, 19 nt, Artificial Sequence
  Synthetic oligonucleotide
uguuuagccacauuuaauc

SEQ ID NO: 2290 - RNA, 19 nt, Artificial Sequence
  Synthetic oligonucleotide
auuaaauguggcuaaacua

SEQ ID NO: 2291 - RNA, 19 nt, Artificial Sequence
  Synthetic oligonucleotide
uaguuuagccacauuuaau

SEQ ID NO: 2292 - RNA, 19 nt, Artificial Sequence
  Synthetic oligonucleotide
uuaaauguggcuaaacuaa

SEQ ID NO: 2293 - RNA, 19 nt, Artificial Sequence
  Synthetic oligonucleotide
uuaguuuagccacauuuaa

SEQ ID NO: 2294 - RNA, 19 nt, Artificial Sequence
  Synthetic oligonucleotide
uaaauguggcuaaacuaga

SEQ ID NO: 2295 - RNA, 19 nt, Artificial Sequence
  Synthetic oligonucleotide
ucuaguuuagccacauuua

SEQ ID NO: 2296 - RNA, 19 nt, Artificial Sequence
  Synthetic oligonucleotide
aauguggcuaaacuagcaa

SEQ ID NO: 2297 - RNA, 19 nt, Artificial Sequence
  Synthetic oligonucleotide
uugcuaguuuagccacauu

SEQ ID NO: 2298 - RNA, 19 nt, Artificial Sequence
  Synthetic oligonucleotide
auguggcuaaacuagcaga

SEQ ID NO: 2299 - RNA, 19 nt, Artificial Sequence
  Synthetic oligonucleotide
ucugcuaguuuagccacau

SEQ ID NO: 2300 - RNA, 19 nt, Artificial Sequence
  Synthetic oligonucleotide
uguggcuaaacuagcagaa

SEQ ID NO: 2301 - RNA, 19 nt, Artificial Sequence
  Synthetic oligonucleotide
uucugcuaguuuagccaca

SEQ ID NO: 2302 - RNA, 19 nt, Artificial Sequence
  Synthetic oligonucleotide
guggcuaaacuagcagaua

SEQ ID NO: 2303 - RNA, 19 nt, Artificial Sequence
  Synthetic oligonucleotide
uaucugcuaguuuagccac

SEQ ID NO: 2304 - RNA, 19 nt, Artificial Sequence
  Synthetic oligonucleotide
uggcuaaacuagcagauga

SEQ ID NO: 2305 - RNA, 19 nt, Artificial Sequence
  Synthetic oligonucleotide
ucaucugcuaguuuagcca

SEQ ID NO: 2306 - RNA, 19 nt, Artificial Sequence
  Synthetic oligonucleotide
gcuaaacuagcagauguua

SEQ ID NO: 2307 - RNA, 19 nt, Artificial Sequence
  Synthetic oligonucleotide
uaacaucugcuaguuuagc

SEQ ID NO: 2308 - RNA, 19 nt, Artificial Sequence
  Synthetic oligonucleotide
cuaaacuagcagauguuca

SEQ ID NO: 2309 - RNA, 19 nt, Artificial Sequence
  Synthetic oligonucleotide
ugaacaucugcuaguuuag

SEQ ID NO: 2310 - RNA, 19 nt, Artificial Sequence
  Synthetic oligonucleotide
uaaacuagcagauguucca

SEQ ID NO: 2311 - RNA, 19 nt, Artificial Sequence
  Synthetic oligonucleotide
uggaacaucugcuaguuua

SEQ ID NO: 2312 - RNA, 19 nt, Artificial Sequence
  Synthetic oligonucleotide
aaacuagcagauguuccua

SEQ ID NO: 2313 - RNA, 19 nt, Artificial Sequence
  Synthetic oligonucleotide
uaggaacaucugcuaguuu

SEQ ID NO: 2314 - RNA, 19 nt, Artificial Sequence
  Synthetic oligonucleotide
cagauguuccuggagaaaa

SEQ ID NO: 2315 - RNA, 19 nt, Artificial Sequence
  Synthetic oligonucleotide
uuuucuccaggaacaucug

SEQ ID NO: 2316 - RNA, 19 nt, Artificial Sequence
  Synthetic oligonucleotide
auguuccuggagaaauuua

SEQ ID NO: 2317 - RNA, 19 nt, Artificial Sequence
  Synthetic oligonucleotide
uaaauuucuccaggaacau

SEQ ID NO: 2318 - RNA, 19 nt, Artificial Sequence
  Synthetic oligonucleotide
agaaagcagcucacaagua

SEQ ID NO: 2319 - RNA, 19 nt, Artificial Sequence
  Synthetic oligonucleotide
uacuugugagcugcuuucu

SEQ ID NO: 2320 - RNA, 19 nt, Artificial Sequence
  Synthetic oligonucleotide
gaaagcagcucacaaguca

SEQ ID NO: 2321 - RNA, 19 nt, Artificial Sequence
  Synthetic oligonucleotide
ugacuugugagcugcuuuc

SEQ ID NO: 2322 - RNA, 19 nt, Artificial Sequence
  Synthetic oligonucleotide
aaagcagcucacaagucaa

SEQ ID NO: 2323 - RNA, 19 nt, Artificial Sequence
  Synthetic oligonucleotide
uugacuugugagcugcuuu

SEQ ID NO: 2324 - RNA, 19 nt, Artificial Sequence
  Synthetic oligonucleotide
agcucacaagucaaaagaa

SEQ ID NO: 2325 - RNA, 19 nt, Artificial Sequence
  Synthetic oligonucleotide
uucuuuugacuugugagcu

SEQ ID NO: 2326 - RNA, 19 nt, Artificial Sequence
  Synthetic oligonucleotide
cucacaagucaaaagagca

SEQ ID NO: 2327 - RNA, 19 nt, Artificial Sequence
  Synthetic oligonucleotide
ugcucuuuugacuugugag

SEQ ID NO: 2328 - RNA, 19 nt, Artificial Sequence
  Synthetic oligonucleotide
ucacaagucaaaagagcua

SEQ ID NO: 2329 - RNA, 19 nt, Artificial Sequence
  Synthetic oligonucleotide
uagcucuuuugacuuguga

SEQ ID NO: 2330 - RNA, 19 nt, Artificial Sequence
  Synthetic oligonucleotide
gagcuggaaggauuaauaa

SEQ ID NO: 2331 - RNA, 19 nt, Artificial Sequence
  Synthetic oligonucleotide
uuauuaauccuuccagcuc

SEQ ID NO: 2332 - RNA, 19 nt, Artificial Sequence
  Synthetic oligonucleotide
gaaggauuaauaaauacga

SEQ ID NO: 2333 - RNA, 19 nt, Artificial Sequence
  Synthetic oligonucleotide
ucguauuuauuaauccuuc

SEQ ID NO: 2334 - RNA, 19 nt, Artificial Sequence
  Synthetic oligonucleotide
ggauuaauaaauacgaaaa

SEQ ID NO: 2335 - RNA, 19 nt, Artificial Sequence
  Synthetic oligonucleotide
uuuucguauuuauuaaucc

SEQ ID NO: 2336 - RNA, 19 nt, Artificial Sequence
  Synthetic oligonucleotide
auuaauaaauacgaaaaga

SEQ ID NO: 2337 - RNA, 19 nt, Artificial Sequence
  Synthetic oligonucleotide
ucuuuucguauuuauuaau

SEQ ID NO: 2338 - RNA, 19 nt, Artificial Sequence
  Synthetic oligonucleotide
auacgaaaagaaagagaca

SEQ ID NO: 2339 - RNA, 19 nt, Artificial Sequence
  Synthetic oligonucleotide
ugucucuuucuuuucguau

SEQ ID NO: 2340 - RNA, 19 nt, Artificial Sequence
  Synthetic oligonucleotide
uacgaaaagaaagagacua

SEQ ID NO: 2341 - RNA, 19 nt, Artificial Sequence
  Synthetic oligonucleotide
uagucucuuucuuuucgua

SEQ ID NO: 2342 - RNA, 19 nt, Artificial Sequence
  Synthetic oligonucleotide
aaagaaagagacucaagua

SEQ ID NO: 2343 - RNA, 19 nt, Artificial Sequence
  Synthetic oligonucleotide
uacuugagucucuuucuuu

SEQ ID NO: 2344 - RNA, 19 nt, Artificial Sequence
  Synthetic oligonucleotide
aagaaagagacucaaguaa

SEQ ID NO: 2345 - RNA, 19 nt, Artificial Sequence
  Synthetic oligonucleotide
uuacuugagucucuuucuu

SEQ ID NO: 2346 - RNA, 19 nt, Artificial Sequence
  Synthetic oligonucleotide
agaaagagacucaaguaua

SEQ ID NO: 2347 - RNA, 19 nt, Artificial Sequence
  Synthetic oligonucleotide
uauacuugagucucuuucu

SEQ ID NO: 2348 - RNA, 19 nt, Artificial Sequence
  Synthetic oligonucleotide
gaaagagacucaaguauua

SEQ ID NO: 2349 - RNA, 19 nt, Artificial Sequence
  Synthetic oligonucleotide
uaauacuugagucucuuuc

SEQ ID NO: 2350 - RNA, 19 nt, Artificial Sequence
  Synthetic oligonucleotide
aaagagacucaaguauuua

SEQ ID NO: 2351 - RNA, 19 nt, Artificial Sequence
  Synthetic oligonucleotide
uaaauacuugagucucuuu

SEQ ID NO: 2352 - RNA, 19 nt, Artificial Sequence
  Synthetic oligonucleotide
agagacucaaguauuuuga

SEQ ID NO: 2353 - RNA, 19 nt, Artificial Sequence
  Synthetic oligonucleotide
ucaaaauacuugagucucu

SEQ ID NO: 2354 - RNA, 19 nt, Artificial Sequence
  Synthetic oligonucleotide
agacucaaguauuuugcaa

SEQ ID NO: 2355 - RNA, 19 nt, Artificial Sequence
  Synthetic oligonucleotide
uugcaaaauacuugagucu

SEQ ID NO: 2356 - RNA, 19 nt, Artificial Sequence
  Synthetic oligonucleotide
acucaaguauuuugcaaaa

SEQ ID NO: 2357 - RNA, 19 nt, Artificial Sequence
  Synthetic oligonucleotide
uuuugcaaaauacuugagu

SEQ ID NO: 2358 - RNA, 19 nt, Artificial Sequence
  Synthetic oligonucleotide
cucaaguauuuugcaaaga

SEQ ID NO: 2359 - RNA, 19 nt, Artificial Sequence
  Synthetic oligonucleotide
ucuuugcaaaauacuugag

SEQ ID NO: 2360 - RNA, 19 nt, Artificial Sequence
  Synthetic oligonucleotide
aaguauuuugcaaaguuaa

SEQ ID NO: 2361 - RNA, 19 nt, Artificial Sequence
  Synthetic oligonucleotide
uuaacuuugcaaaauacuu

SEQ ID NO: 2362 - RNA, 19 nt, Artificial Sequence
  Synthetic oligonucleotide
guauuuugcaaaguuauga

SEQ ID NO: 2363 - RNA, 19 nt, Artificial Sequence
  Synthetic oligonucleotide
ucauaacuuugcaaaauac

SEQ ID NO: 2364 - RNA, 19 nt, Artificial Sequence
  Synthetic oligonucleotide
auuuugcaaaguuauggaa

SEQ ID NO: 2365 - RNA, 19 nt, Artificial Sequence
  Synthetic oligonucleotide
uuccauaacuuugcaaaau

SEQ ID NO: 2366 - RNA, 19 nt, Artificial Sequence
  Synthetic oligonucleotide
uuuugcaaaguuauggaca

SEQ ID NO: 2367 - RNA, 19 nt, Artificial Sequence
  Synthetic oligonucleotide
uguccauaacuuugcaaaa

SEQ ID NO: 2368 - RNA, 19 nt, Artificial Sequence
  Synthetic oligonucleotide
uuugcaaaguuauggacga

SEQ ID NO: 2369 - RNA, 19 nt, Artificial Sequence
  Synthetic oligonucleotide
ucguccauaacuuugcaaa

SEQ ID NO: 2370 - RNA, 19 nt, Artificial Sequence
  Synthetic oligonucleotide
uugcaaaguuauggacgaa

SEQ ID NO: 2371 - RNA, 19 nt, Artificial Sequence
  Synthetic oligonucleotide
uucguccauaacuuugcaa

SEQ ID NO: 2372 - RNA, 19 nt, Artificial Sequence
  Synthetic oligonucleotide
ugcaaaguuauggacgaua

SEQ ID NO: 2373 - RNA, 19 nt, Artificial Sequence
  Synthetic oligonucleotide
uaucguccauaacuuugca

SEQ ID NO: 2374 - RNA, 19 nt, Artificial Sequence
  Synthetic oligonucleotide
aaguuauggacgaugcaua

SEQ ID NO: 2375 - RNA, 19 nt, Artificial Sequence
  Synthetic oligonucleotide
uaugcaucguccauaacuu

SEQ ID NO: 2376 - RNA, 19 nt, Artificial Sequence
  Synthetic oligonucleotide
aguuauggacgaugcauaa

SEQ ID NO: 2377 - RNA, 19 nt, Artificial Sequence
  Synthetic oligonucleotide
uuaugcaucguccauaacu

SEQ ID NO: 2378 - RNA, 19 nt, Artificial Sequence
  Synthetic oligonucleotide
guuauggacgaugcauaaa

SEQ ID NO: 2379 - RNA, 19 nt, Artificial Sequence
  Synthetic oligonucleotide
uuuaugcaucguccauaac

SEQ ID NO: 2380 - RNA, 19 nt, Artificial Sequence
  Synthetic oligonucleotide
uauggacgaugcauaauga

SEQ ID NO: 2381 - RNA, 19 nt, Artificial Sequence
  Synthetic oligonucleotide
ucauuaugcaucguccaua

SEQ ID NO: 2382 - RNA, 19 nt, Artificial Sequence
  Synthetic oligonucleotide
auggacgaugcauaaugca

SEQ ID NO: 2383 - RNA, 19 nt, Artificial Sequence
  Synthetic oligonucleotide
ugcauuaugcaucguccau

SEQ ID NO: 2384 - RNA, 19 nt, Artificial Sequence
  Synthetic oligonucleotide
uggacgaugcauaaugcaa

SEQ ID NO: 2385 - RNA, 19 nt, Artificial Sequence
  Synthetic oligonucleotide
uugcauuaugcaucgucca

SEQ ID NO: 2386 - RNA, 19 nt, Artificial Sequence
  Synthetic oligonucleotide
ggacgaugcauaaugcaca

SEQ ID NO: 2387 - RNA, 19 nt, Artificial Sequence
  Synthetic oligonucleotide
ugugcauuaugcaucgucc

SEQ ID NO: 2388 - RNA, 19 nt, Artificial Sequence
  Synthetic oligonucleotide
gacgaugcauaaugcacaa

SEQ ID NO: 2389 - RNA, 19 nt, Artificial Sequence
  Synthetic oligonucleotide
uugugcauuaugcaucguc

SEQ ID NO: 2390 - RNA, 19 nt, Artificial Sequence
  Synthetic oligonucleotide
cgaugcauaaugcacaaga

SEQ ID NO: 2391 - RNA, 19 nt, Artificial Sequence
  Synthetic oligonucleotide
ucuugugcauuaugcaucg

SEQ ID NO: 2392 - RNA, 19 nt, Artificial Sequence
  Synthetic oligonucleotide
gaugcauaaugcacaagaa

SEQ ID NO: 2393 - RNA, 19 nt, Artificial Sequence
  Synthetic oligonucleotide
uucuugugcauuaugcauc

SEQ ID NO: 2394 - RNA, 19 nt, Artificial Sequence
  Synthetic oligonucleotide
augcauaaugcacaagaca

SEQ ID NO: 2395 - RNA, 19 nt, Artificial Sequence
  Synthetic oligonucleotide
ugucuugugcauuaugcau

SEQ ID NO: 2396 - RNA, 19 nt, Artificial Sequence
  Synthetic oligonucleotide
ugcauaaugcacaagacca

SEQ ID NO: 2397 - RNA, 19 nt, Artificial Sequence
  Synthetic oligonucleotide
uggucuugugcauuaugca

SEQ ID NO: 2398 - RNA, 19 nt, Artificial Sequence
  Synthetic oligonucleotide
ugcacaagaccugcagaaa

SEQ ID NO: 2399 - RNA, 19 nt, Artificial Sequence
  Synthetic oligonucleotide
uuucugcaggucuugugca

SEQ ID NO: 2400 - RNA, 19 nt, Artificial Sequence
  Synthetic oligonucleotide
gcacaagaccugcagaaga

SEQ ID NO: 2401 - RNA, 19 nt, Artificial Sequence
  Synthetic oligonucleotide
ucuucugcaggucuugugc

SEQ ID NO: 2402 - RNA, 19 nt, Artificial Sequence
  Synthetic oligonucleotide
acaagaccugcagaaguga

SEQ ID NO: 2403 - RNA, 19 nt, Artificial Sequence
  Synthetic oligonucleotide
ucacuucugcaggucuugu

SEQ ID NO: 2404 - RNA, 19 nt, Artificial Sequence
  Synthetic oligonucleotide
agaccugcagaaguggaca

SEQ ID NO: 2405 - RNA, 19 nt, Artificial Sequence
  Synthetic oligonucleotide
uguccacuucugcaggucu

SEQ ID NO: 2406 - RNA, 19 nt, Artificial Sequence
  Synthetic oligonucleotide
gaccugcagaaguggacaa

SEQ ID NO: 2407 - RNA, 19 nt, Artificial Sequence
  Synthetic oligonucleotide
uuguccacuucugcagguc

SEQ ID NO: 2408 - RNA, 19 nt, Artificial Sequence
  Synthetic oligonucleotide
aaguggacagaggaguuca

SEQ ID NO: 2409 - RNA, 19 nt, Artificial Sequence
  Synthetic oligonucleotide
ugaacuccucuguccacuu

SEQ ID NO: 2410 - RNA, 19 nt, Artificial Sequence
  Synthetic oligonucleotide
aguggacagaggaguucaa

SEQ ID NO: 2411 - RNA, 19 nt, Artificial Sequence
  Synthetic oligonucleotide
uugaacuccucuguccacu

SEQ ID NO: 2412 - RNA, 19 nt, Artificial Sequence
  Synthetic oligonucleotide
ggacagaggaguucaacaa

SEQ ID NO: 2413 - RNA, 19 nt, Artificial Sequence
  Synthetic oligonucleotide
uuguugaacuccucugucc

SEQ ID NO: 2414 - RNA, 19 nt, Artificial Sequence
  Synthetic oligonucleotide
gacagaggaguucaacaua

SEQ ID NO: 2415 - RNA, 19 nt, Artificial Sequence
  Synthetic oligonucleotide
uauguugaacuccucuguc

SEQ ID NO: 2416 - RNA, 19 nt, Artificial Sequence
  Synthetic oligonucleotide
acagaggaguucaacauga

SEQ ID NO: 2417 - RNA, 19 nt, Artificial Sequence
  Synthetic oligonucleotide
ucauguugaacuccucugu

SEQ ID NO: 2418 - RNA, 19 nt, Artificial Sequence
  Synthetic oligonucleotide
agaggaguucaacauggaa

SEQ ID NO: 2419 - RNA, 19 nt, Artificial Sequence
  Synthetic oligonucleotide
uuccauguugaacuccucu

SEQ ID NO: 2420 - RNA, 19 nt, Artificial Sequence
  Synthetic oligonucleotide
gaggaguucaacauggaaa

SEQ ID NO: 2421 - RNA, 19 nt, Artificial Sequence
  Synthetic oligonucleotide
uuuccauguugaacuccuc

SEQ ID NO: 2422 - RNA, 19 nt, Artificial Sequence
  Synthetic oligonucleotide
ggaguucaacauggaagaa

SEQ ID NO: 2423 - RNA, 19 nt, Artificial Sequence
  Synthetic oligonucleotide
uucuuccauguugaacucc

SEQ ID NO: 2424 - RNA, 19 nt, Artificial Sequence
  Synthetic oligonucleotide
auggaagaaacacagacua

SEQ ID NO: 2425 - RNA, 19 nt, Artificial Sequence
  Synthetic oligonucleotide
uagucuguguuucuuccau

SEQ ID NO: 2426 - RNA, 19 nt, Artificial Sequence
  Synthetic oligonucleotide
gaagaaacacagacuucua

SEQ ID NO: 2427 - RNA, 19 nt, Artificial Sequence
  Synthetic oligonucleotide
uagaagucuguguuucuuc

SEQ ID NO: 2428 - RNA, 19 nt, Artificial Sequence
  Synthetic oligonucleotide
aagaaacacagacuucuca

SEQ ID NO: 2429 - RNA, 19 nt, Artificial Sequence
  Synthetic oligonucleotide
ugagaagucuguguuucuu

SEQ ID NO: 2430 - RNA, 19 nt, Artificial Sequence
  Synthetic oligonucleotide
agaaacacagacuucucua

SEQ ID NO: 2431 - RNA, 19 nt, Artificial Sequence
  Synthetic oligonucleotide
uagagaagucuguguuucu

SEQ ID NO: 2432 - RNA, 19 nt, Artificial Sequence
  Synthetic oligonucleotide
acacagacuucucuucuua

SEQ ID NO: 2433 - RNA, 19 nt, Artificial Sequence
  Synthetic oligonucleotide
uaagaagagaagucugugu

SEQ ID NO: 2434 - RNA, 19 nt, Artificial Sequence
  Synthetic oligonucleotide
ucucuucuucauuaaaaua

SEQ ID NO: 2435 - RNA, 19 nt, Artificial Sequence
  Synthetic oligonucleotide
uauuuuaaugaagaagaga

SEQ ID NO: 2436 - RNA, 19 nt, Artificial Sequence
  Synthetic oligonucleotide
uuaaaaugaagacuacaua

SEQ ID NO: 2437 - RNA, 19 nt, Artificial Sequence
  Synthetic oligonucleotide
uauguagucuucauuuuaa

SEQ ID NO: 2438 - RNA, 19 nt, Artificial Sequence
  Synthetic oligonucleotide
ugaagacuacauuugugaa

SEQ ID NO: 2439 - RNA, 19 nt, Artificial Sequence
  Synthetic oligonucleotide
uucacaaauguagucuuca

SEQ ID NO: 2440 - RNA, 19 nt, Artificial Sequence
  Synthetic oligonucleotide
gaagacuacauuugugaaa

SEQ ID NO: 2441 - RNA, 19 nt, Artificial Sequence
  Synthetic oligonucleotide
uuucacaaauguagucuuc

SEQ ID NO: 2442 - RNA, 19 nt, Artificial Sequence
  Synthetic oligonucleotide
aagacuacauuugugaaca

SEQ ID NO: 2443 - RNA, 19 nt, Artificial Sequence
  Synthetic oligonucleotide
uguucacaaauguagucuu

SEQ ID NO: 2444 - RNA, 19 nt, Artificial Sequence
  Synthetic oligonucleotide
agacuacauuugugaacaa

SEQ ID NO: 2445 - RNA, 19 nt, Artificial Sequence
  Synthetic oligonucleotide
uuguucacaaauguagucu

SEQ ID NO: 2446 - RNA, 19 nt, Artificial Sequence
  Synthetic oligonucleotide
aaaauaccaacuguacaaa

SEQ ID NO: 2447 - RNA, 19 nt, Artificial Sequence
  Synthetic oligonucleotide
uuuguacaguugguauuuu

SEQ ID NO: 2448 - RNA, 19 nt, Artificial Sequence
  Synthetic oligonucleotide
caacuguacaaaauaacua

SEQ ID NO: 2449 - RNA, 19 nt, Artificial Sequence
  Synthetic oligonucleotide
uaguuauuuuguacaguug

SEQ ID NO: 2450 - RNA, 19 nt, Artificial Sequence
  Synthetic oligonucleotide
acuguacaaaauaacucua

SEQ ID NO: 2451 - RNA, 19 nt, Artificial Sequence
  Synthetic oligonucleotide
uagaguuauuuuguacagu

SEQ ID NO: 2452 - RNA, 19 nt, Artificial Sequence
  Synthetic oligonucleotide
uguacaaaauaacucucca

SEQ ID NO: 2453 - RNA, 19 nt, Artificial Sequence
  Synthetic oligonucleotide
uggagaguuauuuuguaca

SEQ ID NO: 2454 - RNA, 19 nt, Artificial Sequence
  Synthetic oligonucleotide
caaaauaacucuccaguaa

SEQ ID NO: 2455 - RNA, 19 nt, Artificial Sequence
  Synthetic oligonucleotide
uuacuggagaguuauuuug

SEQ ID NO: 2456 - RNA, 19 nt, Artificial Sequence
  Synthetic oligonucleotide
aaaauaacucuccaguaaa

SEQ ID NO: 2457 - RNA, 19 nt, Artificial Sequence
  Synthetic oligonucleotide
uuuacuggagaguuauuuu

SEQ ID NO: 2458 - RNA, 19 nt, Artificial Sequence
  Synthetic oligonucleotide
aaauaacucuccaguaaca

SEQ ID NO: 2459 - RNA, 19 nt, Artificial Sequence
  Synthetic oligonucleotide
uguuacuggagaguuauuu

SEQ ID NO: 2460 - RNA, 19 nt, Artificial Sequence
  Synthetic oligonucleotide
aauaacucuccaguaacaa

SEQ ID NO: 2461 - RNA, 19 nt, Artificial Sequence
  Synthetic oligonucleotide
uuguuacuggagaguuauu

SEQ ID NO: 2462 - RNA, 19 nt, Artificial Sequence
  Synthetic oligonucleotide
auaacucuccaguaacaga

SEQ ID NO: 2463 - RNA, 19 nt, Artificial Sequence
  Synthetic oligonucleotide
ucuguuacuggagaguuau

SEQ ID NO: 2464 - RNA, 19 nt, Artificial Sequence
  Synthetic oligonucleotide
uaacucuccaguaacagca

SEQ ID NO: 2465 - RNA, 19 nt, Artificial Sequence
  Synthetic oligonucleotide
ugcuguuacuggagaguua

SEQ ID NO: 2466 - RNA, 19 nt, Artificial Sequence
  Synthetic oligonucleotide
aacucuccaguaacagcca

SEQ ID NO: 2467 - RNA, 19 nt, Artificial Sequence
  Synthetic oligonucleotide
uggcuguuacuggagaguu

SEQ ID NO: 2468 - RNA, 19 nt, Artificial Sequence
  Synthetic oligonucleotide
cucuccaguaacagccuaa

SEQ ID NO: 2469 - RNA, 19 nt, Artificial Sequence
  Synthetic oligonucleotide
uuaggcuguuacuggagag

SEQ ID NO: 2470 - RNA, 19 nt, Artificial Sequence
  Synthetic oligonucleotide
cuccaguaacagccuauca

SEQ ID NO: 2471 - RNA, 19 nt, Artificial Sequence
  Synthetic oligonucleotide
ugauaggcuguuacuggag

SEQ ID NO: 2472 - RNA, 19 nt, Artificial Sequence
  Synthetic oligonucleotide
ccaguaacagccuaucuua

SEQ ID NO: 2473 - RNA, 19 nt, Artificial Sequence
  Synthetic oligonucleotide
uaagauaggcuguuacugg

SEQ ID NO: 2474 - RNA, 19 nt, Artificial Sequence
  Synthetic oligonucleotide
caguaacagccuaucuuua

SEQ ID NO: 2475 - RNA, 19 nt, Artificial Sequence
  Synthetic oligonucleotide
uaaagauaggcuguuacug

SEQ ID NO: 2476 - RNA, 19 nt, Artificial Sequence
  Synthetic oligonucleotide
aguaacagccuaucuuuga

SEQ ID NO: 2477 - RNA, 19 nt, Artificial Sequence
  Synthetic oligonucleotide
ucaaagauaggcuguuacu

SEQ ID NO: 2478 - RNA, 19 nt, Artificial Sequence
  Synthetic oligonucleotide
guaacagccuaucuuugua

SEQ ID NO: 2479 - RNA, 19 nt, Artificial Sequence
  Synthetic oligonucleotide
uacaaagauaggcuguuac

SEQ ID NO: 2480 - RNA, 19 nt, Artificial Sequence
  Synthetic oligonucleotide
uaacagccuaucuuuguga

SEQ ID NO: 2481 - RNA, 19 nt, Artificial Sequence
  Synthetic oligonucleotide
ucacaaagauaggcuguua

SEQ ID NO: 2482 - RNA, 19 nt, Artificial Sequence
  Synthetic oligonucleotide
acagccuaucuuuguguga

SEQ ID NO: 2483 - RNA, 19 nt, Artificial Sequence
  Synthetic oligonucleotide
ucacacaaagauaggcugu

SEQ ID NO: 2484 - RNA, 19 nt, Artificial Sequence
  Synthetic oligonucleotide
cagccuaucuuugugugaa

SEQ ID NO: 2485 - RNA, 19 nt, Artificial Sequence
  Synthetic oligonucleotide
uucacacaaagauaggcug

SEQ ID NO: 2486 - RNA, 19 nt, Artificial Sequence
  Synthetic oligonucleotide
agccuaucuuugugugaca

SEQ ID NO: 2487 - RNA, 19 nt, Artificial Sequence
  Synthetic oligonucleotide
ugucacacaaagauaggcu

SEQ ID NO: 2488 - RNA, 19 nt, Artificial Sequence
  Synthetic oligonucleotide
gccuaucuuugugugacaa

SEQ ID NO: 2489 - RNA, 19 nt, Artificial Sequence
  Synthetic oligonucleotide
uugucacacaaagauaggc

SEQ ID NO: 2490 - RNA, 19 nt, Artificial Sequence
  Synthetic oligonucleotide
uaucuuugugugacaugua

SEQ ID NO: 2491 - RNA, 19 nt, Artificial Sequence
  Synthetic oligonucleotide
uacaugucacacaaagaua

SEQ ID NO: 2492 - RNA, 19 nt, Artificial Sequence
  Synthetic oligonucleotide
aucuuugugugacauguga

SEQ ID NO: 2493 - RNA, 19 nt, Artificial Sequence
  Synthetic oligonucleotide
ucacaugucacacaaagau

SEQ ID NO: 2494 - RNA, 19 nt, Artificial Sequence
  Synthetic oligonucleotide
ucuuugugugacaugugaa

SEQ ID NO: 2495 - RNA, 19 nt, Artificial Sequence
  Synthetic oligonucleotide
uucacaugucacacaaaga

SEQ ID NO: 2496 - RNA, 19 nt, Artificial Sequence
  Synthetic oligonucleotide
cuuugugugacaugugaga

SEQ ID NO: 2497 - RNA, 19 nt, Artificial Sequence
  Synthetic oligonucleotide
ucucacaugucacacaaag

SEQ ID NO: 2498 - RNA, 19 nt, Artificial Sequence
  Synthetic oligonucleotide
ugugacaugugagcauaaa

SEQ ID NO: 2499 - RNA, 19 nt, Artificial Sequence
  Synthetic oligonucleotide
uuuaugcucacaugucaca

SEQ ID NO: 2500 - RNA, 19 nt, Artificial Sequence
  Synthetic oligonucleotide
gacaugugagcauaaaaua

SEQ ID NO: 2501 - RNA, 19 nt, Artificial Sequence
  Synthetic oligonucleotide
uauuuuaugcucacauguc

SEQ ID NO: 2502 - RNA, 19 nt, Artificial Sequence
  Synthetic oligonucleotide
acaugugagcauaaaauua

SEQ ID NO: 2503 - RNA, 19 nt, Artificial Sequence
  Synthetic oligonucleotide
uaauuuuaugcucacaugu

SEQ ID NO: 2504 - RNA, 19 nt, Artificial Sequence
  Synthetic oligonucleotide
caugugagcauaaaauuaa

SEQ ID NO: 2505 - RNA, 19 nt, Artificial Sequence
  Synthetic oligonucleotide
uuaauuuuaugcucacaug

SEQ ID NO: 2506 - RNA, 19 nt, Artificial Sequence
  Synthetic oligonucleotide
ugugagcauaaaauuauga

SEQ ID NO: 2507 - RNA, 19 nt, Artificial Sequence
  Synthetic oligonucleotide
ucauaauuuuaugcucaca

SEQ ID NO: 2508 - RNA, 19 nt, Artificial Sequence
  Synthetic oligonucleotide
gugagcauaaaauuaugaa

SEQ ID NO: 2509 - RNA, 19 nt, Artificial Sequence
  Synthetic oligonucleotide
uucauaauuuuaugcucac

SEQ ID NO: 2510 - RNA, 19 nt, Artificial Sequence
  Synthetic oligonucleotide
ugagcauaaaauuaugaca

SEQ ID NO: 2511 - RNA, 19 nt, Artificial Sequence
  Synthetic oligonucleotide
ugucauaauuuuaugcuca

SEQ ID NO: 2512 - RNA, 19 nt, Artificial Sequence
  Synthetic oligonucleotide
uaaaauuaugaccauggua

SEQ ID NO: 2513 - RNA, 19 nt, Artificial Sequence
  Synthetic oligonucleotide
uaccauggucauaauuuua

SEQ ID NO: 2514 - RNA, 19 nt, Artificial Sequence
  Synthetic oligonucleotide
aaaauuaugaccaugguaa

SEQ ID NO: 2515 - RNA, 19 nt, Artificial Sequence
  Synthetic oligonucleotide
uuaccauggucauaauuuu

SEQ ID NO: 2516 - RNA, 19 nt, Artificial Sequence
  Synthetic oligonucleotide
aauuaugaccaugguauaa

SEQ ID NO: 2517 - RNA, 19 nt, Artificial Sequence
  Synthetic oligonucleotide
uuauaccauggucauaauu

SEQ ID NO: 2518 - RNA, 19 nt, Artificial Sequence
  Synthetic oligonucleotide
auuaugaccaugguauaua

SEQ ID NO: 2519 - RNA, 19 nt, Artificial Sequence
  Synthetic oligonucleotide
uauauaccauggucauaau

SEQ ID NO: 2520 - RNA, 19 nt, Artificial Sequence
  Synthetic oligonucleotide
ugaccaugguauauuccua

SEQ ID NO: 2521 - RNA, 19 nt, Artificial Sequence
  Synthetic oligonucleotide
uaggaauauaccaugguca

SEQ ID NO: 2522 - RNA, 19 nt, Artificial Sequence
  Synthetic oligonucleotide
gaccaugguauauuccuaa

SEQ ID NO: 2523 - RNA, 19 nt, Artificial Sequence
  Synthetic oligonucleotide
uuaggaauauaccaugguc

SEQ ID NO: 2524 - RNA, 19 nt, Artificial Sequence
  Synthetic oligonucleotide
accaugguauauuccuaua

SEQ ID NO: 2525 - RNA, 19 nt, Artificial Sequence
  Synthetic oligonucleotide
uauaggaauauaccauggu

SEQ ID NO: 2526 - RNA, 19 nt, Artificial Sequence
  Synthetic oligonucleotide
augguauauuccuauugga

SEQ ID NO: 2527 - RNA, 19 nt, Artificial Sequence
  Synthetic oligonucleotide
uccaauaggaauauaccau

SEQ ID NO: 2528 - RNA, 19 nt, Artificial Sequence
  Synthetic oligonucleotide
ugguauauuccuauuggaa

SEQ ID NO: 2529 - RNA, 19 nt, Artificial Sequence
  Synthetic oligonucleotide
uuccaauaggaauauacca

SEQ ID NO: 2530 - RNA, 19 nt, Artificial Sequence
  Synthetic oligonucleotide
gguauauuccuauuggaaa

SEQ ID NO: 2531 - RNA, 19 nt, Artificial Sequence
  Synthetic oligonucleotide
uuuccaauaggaauauacc

SEQ ID NO: 2532 - RNA, 19 nt, Artificial Sequence
  Synthetic oligonucleotide
auuccuauuggaaacagaa

SEQ ID NO: 2533 - RNA, 19 nt, Artificial Sequence
  Synthetic oligonucleotide
uucuguuuccaauaggaau

SEQ ID NO: 2534 - RNA, 19 nt, Artificial Sequence
  Synthetic oligonucleotide
uuccuauuggaaacagaga

SEQ ID NO: 2535 - RNA, 19 nt, Artificial Sequence
  Synthetic oligonucleotide
ucucuguuuccaauaggaa

SEQ ID NO: 2536 - RNA, 19 nt, Artificial Sequence
  Synthetic oligonucleotide
uccuauuggaaacagagaa

SEQ ID NO: 2537 - RNA, 19 nt, Artificial Sequence
  Synthetic oligonucleotide
uucucuguuuccaauagga

SEQ ID NO: 2538 - RNA, 19 nt, Artificial Sequence
  Synthetic oligonucleotide
ccuauuggaaacagagaga

SEQ ID NO: 2539 - RNA, 19 nt, Artificial Sequence
  Synthetic oligonucleotide
ucucucuguuuccaauagg

SEQ ID NO: 2540 - RNA, 19 nt, Artificial Sequence
  Synthetic oligonucleotide
auuggaaacagagagguua

SEQ ID NO: 2541 - RNA, 19 nt, Artificial Sequence
  Synthetic oligonucleotide
uaaccucucuguuuccaau

SEQ ID NO: 2542 - RNA, 19 nt, Artificial Sequence
  Synthetic oligonucleotide
uuggaaacagagagguuua

SEQ ID NO: 2543 - RNA, 19 nt, Artificial Sequence
  Synthetic oligonucleotide
uaaaccucucuguuuccaa

SEQ ID NO: 2544 - RNA, 19 nt, Artificial Sequence
  Synthetic oligonucleotide
uggaaacagagagguuuua

SEQ ID NO: 2545 - RNA, 19 nt, Artificial Sequence
  Synthetic oligonucleotide
uaaaaccucucuguuucca

SEQ ID NO: 2546 - RNA, 19 nt, Artificial Sequence
  Synthetic oligonucleotide
guuucugucuuccuaacua

SEQ ID NO: 2547 - RNA, 19 nt, Artificial Sequence
  Synthetic oligonucleotide
uaguuaggaagacagaaac

SEQ ID NO: 2548 - RNA, 19 nt, Artificial Sequence
  Synthetic oligonucleotide
ucugucuuccuaacuuuua

SEQ ID NO: 2549 - RNA, 19 nt, Artificial Sequence
  Synthetic oligonucleotide
uaaaaguuaggaagacaga

SEQ ID NO: 2550 - RNA, 19 nt, Artificial Sequence
  Synthetic oligonucleotide
cugucuuccuaacuuuuca

SEQ ID NO: 2551 - RNA, 19 nt, Artificial Sequence
  Synthetic oligonucleotide
ugaaaaguuaggaagacag

SEQ ID NO: 2552 - RNA, 19 nt, Artificial Sequence
  Synthetic oligonucleotide
gucuuccuaacuuuucuaa

SEQ ID NO: 2553 - RNA, 19 nt, Artificial Sequence
  Synthetic oligonucleotide
uuagaaaaguuaggaagac

SEQ ID NO: 2554 - RNA, 19 nt, Artificial Sequence
  Synthetic oligonucleotide
ucuuccuaacuuuucuaca

SEQ ID NO: 2555 - RNA, 19 nt, Artificial Sequence
  Synthetic oligonucleotide
uguagaaaaguuaggaaga

SEQ ID NO: 2556 - RNA, 19 nt, Artificial Sequence
  Synthetic oligonucleotide
ccuaacuuuucuacguaua

SEQ ID NO: 2557 - RNA, 19 nt, Artificial Sequence
  Synthetic oligonucleotide
uauacguagaaaaguuagg

SEQ ID NO: 2558 - RNA, 19 nt, Artificial Sequence
  Synthetic oligonucleotide
cuaacuuuucuacguauaa

SEQ ID NO: 2559 - RNA, 19 nt, Artificial Sequence
  Synthetic oligonucleotide
uuauacguagaaaaguuag

SEQ ID NO: 2560 - RNA, 19 nt, Artificial Sequence
  Synthetic oligonucleotide
uaacuuuucuacguauaaa

SEQ ID NO: 2561 - RNA, 19 nt, Artificial Sequence
  Synthetic oligonucleotide
uuuauacguagaaaaguua

SEQ ID NO: 2562 - RNA, 19 nt, Artificial Sequence
  Synthetic oligonucleotide
aacuuuucuacguauaaaa

SEQ ID NO: 2563 - RNA, 19 nt, Artificial Sequence
  Synthetic oligonucleotide
uuuuauacguagaaaaguu

SEQ ID NO: 2564 - RNA, 19 nt, Artificial Sequence
  Synthetic oligonucleotide
acuuuucuacguauaaaca

SEQ ID NO: 2565 - RNA, 19 nt, Artificial Sequence
  Synthetic oligonucleotide
uguuuauacguagaaaagu

SEQ ID NO: 2566 - RNA, 19 nt, Artificial Sequence
  Synthetic oligonucleotide
uuuucuacguauaaacaca

SEQ ID NO: 2567 - RNA, 19 nt, Artificial Sequence
  Synthetic oligonucleotide
uguguuuauacguagaaaa

SEQ ID NO: 2568 - RNA, 19 nt, Artificial Sequence
  Synthetic oligonucleotide
uuucuacguauaaacacua

SEQ ID NO: 2569 - RNA, 19 nt, Artificial Sequence
  Synthetic oligonucleotide
uaguguuuauacguagaaa

SEQ ID NO: 2570 - RNA, 19 nt, Artificial Sequence
  Synthetic oligonucleotide
ucuacguauaaacacucua

SEQ ID NO: 2571 - RNA, 19 nt, Artificial Sequence
  Synthetic oligonucleotide
uagaguguuuauacguaga

SEQ ID NO: 2572 - RNA, 19 nt, Artificial Sequence
  Synthetic oligonucleotide
uacguauaaacacucuuga

SEQ ID NO: 2573 - RNA, 19 nt, Artificial Sequence
  Synthetic oligonucleotide
ucaagaguguuuauacgua

SEQ ID NO: 2574 - RNA, 19 nt, Artificial Sequence
  Synthetic oligonucleotide
acguauaaacacucuugaa

SEQ ID NO: 2575 - RNA, 19 nt, Artificial Sequence
  Synthetic oligonucleotide
uucaagaguguuuauacgu

SEQ ID NO: 2576 - RNA, 19 nt, Artificial Sequence
  Synthetic oligonucleotide
cguauaaacacucuugaaa

SEQ ID NO: 2577 - RNA, 19 nt, Artificial Sequence
  Synthetic oligonucleotide
uuucaagaguguuuauacg

SEQ ID NO: 2578 - RNA, 19 nt, Artificial Sequence
  Synthetic oligonucleotide
auaaacacucuugaauaga

SEQ ID NO: 2579 - RNA, 19 nt, Artificial Sequence
  Synthetic oligonucleotide
ucuauucaagaguguuuau

SEQ ID NO: 2580 - RNA, 19 nt, Artificial Sequence
  Synthetic oligonucleotide
uaaacacucuugaauagaa

SEQ ID NO: 2581 - RNA, 19 nt, Artificial Sequence
  Synthetic oligonucleotide
uucuauucaagaguguuua

SEQ ID NO: 2582 - RNA, 19 nt, Artificial Sequence
  Synthetic oligonucleotide
acacucuugaauagacuua

SEQ ID NO: 2583 - RNA, 19 nt, Artificial Sequence
  Synthetic oligonucleotide
uaagucuauucaagagugu

SEQ ID NO: 2584 - RNA, 19 nt, Artificial Sequence
  Synthetic oligonucleotide
acucuugaauagacuucca

SEQ ID NO: 2585 - RNA, 19 nt, Artificial Sequence
  Synthetic oligonucleotide
uggaagucuauucaagagu

SEQ ID NO: 2586 - RNA, 19 nt, Artificial Sequence
  Synthetic oligonucleotide
cucuugaauagacuuccaa

SEQ ID NO: 2587 - RNA, 19 nt, Artificial Sequence
  Synthetic oligonucleotide
uuggaagucuauucaagag

SEQ ID NO: 2588 - RNA, 19 nt, Artificial Sequence
  Synthetic oligonucleotide
gaauagacuuccacuuuga

SEQ ID NO: 2589 - RNA, 19 nt, Artificial Sequence
  Synthetic oligonucleotide
ucaaaguggaagucuauuc

SEQ ID NO: 2590 - RNA, 19 nt, Artificial Sequence
  Synthetic oligonucleotide
aauagacuuccacuuugua

SEQ ID NO: 2591 - RNA, 19 nt, Artificial Sequence
  Synthetic oligonucleotide
uacaaaguggaagucuauu

SEQ ID NO: 2592 - RNA, 19 nt, Artificial Sequence
  Synthetic oligonucleotide
auagacuuccacuuuguaa

SEQ ID NO: 2593 - RNA, 19 nt, Artificial Sequence
  Synthetic oligonucleotide
uuacaaaguggaagucuau

SEQ ID NO: 2594 - RNA, 19 nt, Artificial Sequence
  Synthetic oligonucleotide
uagacuuccacuuuguaaa

SEQ ID NO: 2595 - RNA, 19 nt, Artificial Sequence
  Synthetic oligonucleotide
uuuacaaaguggaagucua

SEQ ID NO: 2596 - RNA, 19 nt, Artificial Sequence
  Synthetic oligonucleotide
agacuuccacuuuguaaua

SEQ ID NO: 2597 - RNA, 19 nt, Artificial Sequence
  Synthetic oligonucleotide
uauuacaaaguggaagucu

SEQ ID NO: 2598 - RNA, 19 nt, Artificial Sequence
  Synthetic oligonucleotide
gacuuccacuuuguaauua

SEQ ID NO: 2599 - RNA, 19 nt, Artificial Sequence
  Synthetic oligonucleotide
uaauuacaaaguggaaguc

SEQ ID NO: 2600 - RNA, 19 nt, Artificial Sequence
  Synthetic oligonucleotide
acuuccacuuuguaauuaa

SEQ ID NO: 2601 - RNA, 19 nt, Artificial Sequence
  Synthetic oligonucleotide
uuaauuacaaaguggaagu

SEQ ID NO: 2602 - RNA, 19 nt, Artificial Sequence
  Synthetic oligonucleotide
cuuccacuuuguaauuaga

SEQ ID NO: 2603 - RNA, 19 nt, Artificial Sequence
  Synthetic oligonucleotide
ucuaauuacaaaguggaag

SEQ ID NO: 2604 - RNA, 19 nt, Artificial Sequence
  Synthetic oligonucleotide
uccacuuuguaauuagaaa

SEQ ID NO: 2605 - RNA, 19 nt, Artificial Sequence
  Synthetic oligonucleotide
uuucuaauuacaaagugga

SEQ ID NO: 2606 - RNA, 19 nt, Artificial Sequence
  Synthetic oligonucleotide
acuuuguaauuagaaaaua

SEQ ID NO: 2607 - RNA, 19 nt, Artificial Sequence
  Synthetic oligonucleotide
uauuuucuaauuacaaagu

SEQ ID NO: 2608 - RNA, 19 nt, Artificial Sequence
  Synthetic oligonucleotide
agaaaauuuuauggacaga

SEQ ID NO: 2609 - RNA, 19 nt, Artificial Sequence
  Synthetic oligonucleotide
ucuguccauaaaauuuucu

SEQ ID NO: 2610 - RNA, 19 nt, Artificial Sequence
  Synthetic oligonucleotide
gaaaauuuuauggacagua

SEQ ID NO: 2611 - RNA, 19 nt, Artificial Sequence
  Synthetic oligonucleotide
uacuguccauaaaauuuuc

SEQ ID NO: 2612 - RNA, 19 nt, Artificial Sequence
  Synthetic oligonucleotide
aauuuuauggacaguaaga

SEQ ID NO: 2613 - RNA, 19 nt, Artificial Sequence
  Synthetic oligonucleotide
ucuuacuguccauaaaauu

SEQ ID NO: 2614 - RNA, 19 nt, Artificial Sequence
  Synthetic oligonucleotide
auuuuauggacaguaagua

SEQ ID NO: 2615 - RNA, 19 nt, Artificial Sequence
  Synthetic oligonucleotide
uacuuacuguccauaaaau

SEQ ID NO: 2616 - RNA, 19 nt, Artificial Sequence
  Synthetic oligonucleotide
uuuauggacaguaagucca

SEQ ID NO: 2617 - RNA, 19 nt, Artificial Sequence
  Synthetic oligonucleotide
uggacuuacuguccauaaa

SEQ ID NO: 2618 - RNA, 19 nt, Artificial Sequence
  Synthetic oligonucleotide
uuauggacaguaaguccaa

SEQ ID NO: 2619 - RNA, 19 nt, Artificial Sequence
  Synthetic oligonucleotide
uuggacuuacuguccauaa

SEQ ID NO: 2620 - RNA, 19 nt, Artificial Sequence
  Synthetic oligonucleotide
uggacaguaaguccaguaa

SEQ ID NO: 2621 - RNA, 19 nt, Artificial Sequence
  Synthetic oligonucleotide
uuacuggacuuacugucca

SEQ ID NO: 2622 - RNA, 19 nt, Artificial Sequence
  Synthetic oligonucleotide
gacaguaaguccaguaaaa

SEQ ID NO: 2623 - RNA, 19 nt, Artificial Sequence
  Synthetic oligonucleotide
uuuuacuggacuuacuguc

SEQ ID NO: 2624 - RNA, 19 nt, Artificial Sequence
  Synthetic oligonucleotide
acaguaaguccaguaaaga

SEQ ID NO: 2625 - RNA, 19 nt, Artificial Sequence
  Synthetic oligonucleotide
ucuuuacuggacuuacugu

SEQ ID NO: 2626 - RNA, 19 nt, Artificial Sequence
  Synthetic oligonucleotide
caguaaguccaguaaagca

SEQ ID NO: 2627 - RNA, 19 nt, Artificial Sequence
  Synthetic oligonucleotide
ugcuuuacuggacuuacug

SEQ ID NO: 2628 - RNA, 19 nt, Artificial Sequence
  Synthetic oligonucleotide
aguaaguccaguaaagcca

SEQ ID NO: 2629 - RNA, 19 nt, Artificial Sequence
  Synthetic oligonucleotide
uggcuuuacuggacuuacu

SEQ ID NO: 2630 - RNA, 19 nt, Artificial Sequence
  Synthetic oligonucleotide
guaaguccaguaaagccua

SEQ ID NO: 2631 - RNA, 19 nt, Artificial Sequence
  Synthetic oligonucleotide
uaggcuuuacuggacuuac

SEQ ID NO: 2632 - RNA, 19 nt, Artificial Sequence
  Synthetic oligonucleotide
uaaguccaguaaagccuua

SEQ ID NO: 2633 - RNA, 19 nt, Artificial Sequence
  Synthetic oligonucleotide
uaaggcuuuacuggacuua

SEQ ID NO: 2634 - RNA, 19 nt, Artificial Sequence
  Synthetic oligonucleotide
aaguccaguaaagccuuaa

SEQ ID NO: 2635 - RNA, 19 nt, Artificial Sequence
  Synthetic oligonucleotide
uuaaggcuuuacuggacuu

SEQ ID NO: 2636 - RNA, 19 nt, Artificial Sequence
  Synthetic oligonucleotide
aguccaguaaagccuuaaa

SEQ ID NO: 2637 - RNA, 19 nt, Artificial Sequence
  Synthetic oligonucleotide
uuuaaggcuuuacuggacu

SEQ ID NO: 2638 - RNA, 19 nt, Artificial Sequence
  Synthetic oligonucleotide
guccaguaaagccuuaaga

SEQ ID NO: 2639 - RNA, 19 nt, Artificial Sequence
  Synthetic oligonucleotide
ucuuaaggcuuuacuggac

SEQ ID NO: 2640 - RNA, 19 nt, Artificial Sequence
  Synthetic oligonucleotide
uccaguaaagccuuaagua

SEQ ID NO: 2641 - RNA, 19 nt, Artificial Sequence
  Synthetic oligonucleotide
uacuuaaggcuuuacugga

SEQ ID NO: 2642 - RNA, 19 nt, Artificial Sequence
  Synthetic oligonucleotide
ccaguaaagccuuaaguga

SEQ ID NO: 2643 - RNA, 19 nt, Artificial Sequence
  Synthetic oligonucleotide
ucacuuaaggcuuuacugg

SEQ ID NO: 2644 - RNA, 19 nt, Artificial Sequence
  Synthetic oligonucleotide
caguaaagccuuaagugga

SEQ ID NO: 2645 - RNA, 19 nt, Artificial Sequence
  Synthetic oligonucleotide
uccacuuaaggcuuuacug

SEQ ID NO: 2646 - RNA, 19 nt, Artificial Sequence
  Synthetic oligonucleotide
guaaagccuuaaguggcaa

SEQ ID NO: 2647 - RNA, 19 nt, Artificial Sequence
  Synthetic oligonucleotide
uugccacuuaaggcuuuac

SEQ ID NO: 2648 - RNA, 19 nt, Artificial Sequence
  Synthetic oligonucleotide
aagccuuaaguggcagaaa

SEQ ID NO: 2649 - RNA, 19 nt, Artificial Sequence
  Synthetic oligonucleotide
uuucugccacuuaaggcuu

SEQ ID NO: 2650 - RNA, 19 nt, Artificial Sequence
  Synthetic oligonucleotide
agccuuaaguggcagaaua

SEQ ID NO: 2651 - RNA, 19 nt, Artificial Sequence
  Synthetic oligonucleotide
uauucugccacuuaaggcu

SEQ ID NO: 2652 - RNA, 19 nt, Artificial Sequence
  Synthetic oligonucleotide
ccuuaaguggcagaauaua

SEQ ID NO: 2653 - RNA, 19 nt, Artificial Sequence
  Synthetic oligonucleotide
uauauucugccacuuaagg

SEQ ID NO: 2654 - RNA, 19 nt, Artificial Sequence
  Synthetic oligonucleotide
cuuaaguggcagaauauaa

SEQ ID NO: 2655 - RNA, 19 nt, Artificial Sequence
  Synthetic oligonucleotide
uuauauucugccacuuaag

SEQ ID NO: 2656 - RNA, 19 nt, Artificial Sequence
  Synthetic oligonucleotide
uuaaguggcagaauauaaa

SEQ ID NO: 2657 - RNA, 19 nt, Artificial Sequence
  Synthetic oligonucleotide
uuuauauucugccacuuaa

SEQ ID NO: 2658 - RNA, 19 nt, Artificial Sequence
  Synthetic oligonucleotide
uaaguggcagaauauaaua

SEQ ID NO: 2659 - RNA, 19 nt, Artificial Sequence
  Synthetic oligonucleotide
uauuauauucugccacuua

SEQ ID NO: 2660 - RNA, 19 nt, Artificial Sequence
  Synthetic oligonucleotide
guggcagaauauaauucca

SEQ ID NO: 2661 - RNA, 19 nt, Artificial Sequence
  Synthetic oligonucleotide
uggaauuauauucugccac

SEQ ID NO: 2662 - RNA, 19 nt, Artificial Sequence
  Synthetic oligonucleotide
uggcagaauauaauuccca

SEQ ID NO: 2663 - RNA, 19 nt, Artificial Sequence
  Synthetic oligonucleotide
ugggaauuauauucugcca

SEQ ID NO: 2664 - RNA, 19 nt, Artificial Sequence
  Synthetic oligonucleotide
gcagaauauaauucccaaa

SEQ ID NO: 2665 - RNA, 19 nt, Artificial Sequence
  Synthetic oligonucleotide
uuugggaauuauauucugc

SEQ ID NO: 2666 - RNA, 19 nt, Artificial Sequence
  Synthetic oligonucleotide
aauauaauucccaagcuua

SEQ ID NO: 2667 - RNA, 19 nt, Artificial Sequence
  Synthetic oligonucleotide
uaagcuugggaauuauauu

SEQ ID NO: 2668 - RNA, 19 nt, Artificial Sequence
  Synthetic oligonucleotide
uauaauucccaagcuuuua

SEQ ID NO: 2669 - RNA, 19 nt, Artificial Sequence
  Synthetic oligonucleotide
uaaaagcuugggaauuaua

SEQ ID NO: 2670 - RNA, 19 nt, Artificial Sequence
  Synthetic oligonucleotide
auaauucccaagcuuuuga

SEQ ID NO: 2671 - RNA, 19 nt, Artificial Sequence
  Synthetic oligonucleotide
ucaaaagcuugggaauuau

SEQ ID NO: 2672 - RNA, 19 nt, Artificial Sequence
  Synthetic oligonucleotide
uaauucccaagcuuuugga

SEQ ID NO: 2673 - RNA, 19 nt, Artificial Sequence
  Synthetic oligonucleotide
uccaaaagcuugggaauua

SEQ ID NO: 2674 - RNA, 19 nt, Artificial Sequence
  Synthetic oligonucleotide
aauucccaagcuuuuggaa

SEQ ID NO: 2675 - RNA, 19 nt, Artificial Sequence
  Synthetic oligonucleotide
uuccaaaagcuugggaauu

SEQ ID NO: 2676 - RNA, 19 nt, Artificial Sequence
  Synthetic oligonucleotide
auucccaagcuuuuggaga

SEQ ID NO: 2677 - RNA, 19 nt, Artificial Sequence
  Synthetic oligonucleotide
ucuccaaaagcuugggaau

SEQ ID NO: 2678 - RNA, 19 nt, Artificial Sequence
  Synthetic oligonucleotide
aagcuuuuggagggugaua

SEQ ID NO: 2679 - RNA, 19 nt, Artificial Sequence
  Synthetic oligonucleotide
uaucacccuccaaaagcuu

SEQ ID NO: 2680 - RNA, 19 nt, Artificial Sequence
  Synthetic oligonucleotide
agcuuuuggagggugauaa

SEQ ID NO: 2681 - RNA, 19 nt, Artificial Sequence
  Synthetic oligonucleotide
uuaucacccuccaaaagcu

SEQ ID NO: 2682 - RNA, 19 nt, Artificial Sequence
  Synthetic oligonucleotide
gcuuuuggagggugauaua

SEQ ID NO: 2683 - RNA, 19 nt, Artificial Sequence
  Synthetic oligonucleotide
uauaucacccuccaaaagc

SEQ ID NO: 2684 - RNA, 19 nt, Artificial Sequence
  Synthetic oligonucleotide
cuuuuggagggugauauaa

SEQ ID NO: 2685 - RNA, 19 nt, Artificial Sequence
  Synthetic oligonucleotide
uuauaucacccuccaaaag

SEQ ID NO: 2686 - RNA, 19 nt, Artificial Sequence
  Synthetic oligonucleotide
uuuuggagggugauauaaa

SEQ ID NO: 2687 - RNA, 19 nt, Artificial Sequence
  Synthetic oligonucleotide
uuuauaucacccuccaaaa

SEQ ID NO: 2688 - RNA, 19 nt, Artificial Sequence
  Synthetic oligonucleotide
uuuguuucaguucagauaa

SEQ ID NO: 2689 - RNA, 19 nt, Artificial Sequence
  Synthetic oligonucleotide
uuaucugaacugaaacaaa

SEQ ID NO: 2690 - RNA, 19 nt, Artificial Sequence
  Synthetic oligonucleotide
ucaguucagauaauuggca

SEQ ID NO: 2691 - RNA, 19 nt, Artificial Sequence
  Synthetic oligonucleotide
ugccaauuaucugaacuga

SEQ ID NO: 2692 - RNA, 19 nt, Artificial Sequence
  Synthetic oligonucleotide
uuggcaacugggugaauca

SEQ ID NO: 2693 - RNA, 19 nt, Artificial Sequence
  Synthetic oligonucleotide
ugauucacccaguugccaa

SEQ ID NO: 2694 - RNA, 19 nt, Artificial Sequence
  Synthetic oligonucleotide
ggcaacugggugaaucuga

SEQ ID NO: 2695 - RNA, 19 nt, Artificial Sequence
  Synthetic oligonucleotide
ucagauucacccaguugcc

SEQ ID NO: 2696 - RNA, 19 nt, Artificial Sequence
  Synthetic oligonucleotide
gcaacugggugaaucugga

SEQ ID NO: 2697 - RNA, 19 nt, Artificial Sequence
  Synthetic oligonucleotide
uccagauucacccaguugc

SEQ ID NO: 2698 - RNA, 19 nt, Artificial Sequence
  Synthetic oligonucleotide
caacugggugaaucuggca

SEQ ID NO: 2699 - RNA, 19 nt, Artificial Sequence
  Synthetic oligonucleotide
ugccagauucacccaguug

SEQ ID NO: 2700 - RNA, 19 nt, Artificial Sequence
  Synthetic oligonucleotide
gugaaucuggcaggaauca

SEQ ID NO: 2701 - RNA, 19 nt, Artificial Sequence
  Synthetic oligonucleotide
ugauuccugccagauucac

SEQ ID NO: 2702 - RNA, 19 nt, Artificial Sequence
  Synthetic oligonucleotide
ugaaucuggcaggaaucua

SEQ ID NO: 2703 - RNA, 19 nt, Artificial Sequence
  Synthetic oligonucleotide
uagauuccugccagauuca

SEQ ID NO: 2704 - RNA, 19 nt, Artificial Sequence
  Synthetic oligonucleotide
gaaucuggcaggaaucuaa

SEQ ID NO: 2705 - RNA, 19 nt, Artificial Sequence
  Synthetic oligonucleotide
uuagauuccugccagauuc

SEQ ID NO: 2706 - RNA, 19 nt, Artificial Sequence
  Synthetic oligonucleotide
aaucuggcaggaaucuaua

SEQ ID NO: 2707 - RNA, 19 nt, Artificial Sequence
  Synthetic oligonucleotide
uauagauuccugccagauu

SEQ ID NO: 2708 - RNA, 19 nt, Artificial Sequence
  Synthetic oligonucleotide
aucuggcaggaaucuauca

SEQ ID NO: 2709 - RNA, 19 nt, Artificial Sequence
  Synthetic oligonucleotide
ugauagauuccugccagau

SEQ ID NO: 2710 - RNA, 19 nt, Artificial Sequence
  Synthetic oligonucleotide
cuggcaggaaucuauccaa

SEQ ID NO: 2711 - RNA, 19 nt, Artificial Sequence
  Synthetic oligonucleotide
uuggauagauuccugccag

SEQ ID NO: 2712 - RNA, 19 nt, Artificial Sequence
  Synthetic oligonucleotide
uggcaggaaucuauccaua

SEQ ID NO: 2713 - RNA, 19 nt, Artificial Sequence
  Synthetic oligonucleotide
uauggauagauuccugcca

SEQ ID NO: 2714 - RNA, 19 nt, Artificial Sequence
  Synthetic oligonucleotide
ggcaggaaucuauccauua

SEQ ID NO: 2715 - RNA, 19 nt, Artificial Sequence
  Synthetic oligonucleotide
uaauggauagauuccugcc

SEQ ID NO: 2716 - RNA, 19 nt, Artificial Sequence
  Synthetic oligonucleotide
gcaggaaucuauccauuga

SEQ ID NO: 2717 - RNA, 19 nt, Artificial Sequence
  Synthetic oligonucleotide
ucaauggauagauuccugc

SEQ ID NO: 2718 - RNA, 19 nt, Artificial Sequence
  Synthetic oligonucleotide
caggaaucuauccauugaa

SEQ ID NO: 2719 - RNA, 19 nt, Artificial Sequence
  Synthetic oligonucleotide
uucaauggauagauuccug

SEQ ID NO: 2720 - RNA, 19 nt, Artificial Sequence
  Synthetic oligonucleotide
aggaaucuauccauugaaa

SEQ ID NO: 2721 - RNA, 19 nt, Artificial Sequence
  Synthetic oligonucleotide
uuucaauggauagauuccu

SEQ ID NO: 2722 - RNA, 19 nt, Artificial Sequence
  Synthetic oligonucleotide
ggaaucuauccauugaaca

SEQ ID NO: 2723 - RNA, 19 nt, Artificial Sequence
  Synthetic oligonucleotide
uguucaauggauagauucc

SEQ ID NO: 2724 - RNA, 19 nt, Artificial Sequence
  Synthetic oligonucleotide
gaaucuauccauugaacua

SEQ ID NO: 2725 - RNA, 19 nt, Artificial Sequence
  Synthetic oligonucleotide
uaguucaauggauagauuc

SEQ ID NO: 2726 - RNA, 19 nt, Artificial Sequence
  Synthetic oligonucleotide
aaucuauccauugaacuaa

SEQ ID NO: 2727 - RNA, 19 nt, Artificial Sequence
  Synthetic oligonucleotide
uuaguucaauggauagauu

SEQ ID NO: 2728 - RNA, 19 nt, Artificial Sequence
  Synthetic oligonucleotide
aucuauccauugaacuaaa

SEQ ID NO: 2729 - RNA, 19 nt, Artificial Sequence
  Synthetic oligonucleotide
uuuaguucaauggauagau

SEQ ID NO: 2730 - RNA, 19 nt, Artificial Sequence
  Synthetic oligonucleotide
ucuauccauugaacuaaaa

SEQ ID NO: 2731 - RNA, 19 nt, Artificial Sequence
  Synthetic oligonucleotide
uuuuaguucaauggauaga

SEQ ID NO: 2732 - RNA, 19 nt, Artificial Sequence
  Synthetic oligonucleotide
uauccauugaacuaaaaua

SEQ ID NO: 2733 - RNA, 19 nt, Artificial Sequence
  Synthetic oligonucleotide
uauuuuaguucaauggaua

SEQ ID NO: 2734 - RNA, 19 nt, Artificial Sequence
  Synthetic oligonucleotide
ccauugaacuaaaauaaua

SEQ ID NO: 2735 - RNA, 19 nt, Artificial Sequence
  Synthetic oligonucleotide
uauuauuuuaguucaaugg

SEQ ID NO: 2736 - RNA, 19 nt, Artificial Sequence
  Synthetic oligonucleotide
ugaacuaaaauaauuuuaa

SEQ ID NO: 2737 - RNA, 19 nt, Artificial Sequence
  Synthetic oligonucleotide
uuaaaauuauuuuaguuca

SEQ ID NO: 2738 - RNA, 19 nt, Artificial Sequence
  Synthetic oligonucleotide
acuaaaauaauuuuauuaa

SEQ ID NO: 2739 - RNA, 19 nt, Artificial Sequence
  Synthetic oligonucleotide
uuaauaaaauuauuuuagu

SEQ ID NO: 2740 - RNA, 19 nt, Artificial Sequence
  Synthetic oligonucleotide
uuuauuaugcaaccaguua

SEQ ID NO: 2741 - RNA, 19 nt, Artificial Sequence
  Synthetic oligonucleotide
uaacugguugcauaauaaa

SEQ ID NO: 2742 - RNA, 19 nt, Artificial Sequence
  Synthetic oligonucleotide
uuauuaugcaaccaguuua

SEQ ID NO: 2743 - RNA, 19 nt, Artificial Sequence
  Synthetic oligonucleotide
uaaacugguugcauaauaa

SEQ ID NO: 2744 - RNA, 19 nt, Artificial Sequence
  Synthetic oligonucleotide
uauuaugcaaccaguuuaa

SEQ ID NO: 2745 - RNA, 19 nt, Artificial Sequence
  Synthetic oligonucleotide
uuaaacugguugcauaaua

SEQ ID NO: 2746 - RNA, 19 nt, Artificial Sequence
  Synthetic oligonucleotide
auuaugcaaccaguuuaua

SEQ ID NO: 2747 - RNA, 19 nt, Artificial Sequence
  Synthetic oligonucleotide
uauaaacugguugcauaau

SEQ ID NO: 2748 - RNA, 19 nt, Artificial Sequence
  Synthetic oligonucleotide
uaugcaaccaguuuaucca

SEQ ID NO: 2749 - RNA, 19 nt, Artificial Sequence
  Synthetic oligonucleotide
uggauaaacugguugcaua

SEQ ID NO: 2750 - RNA, 19 nt, Artificial Sequence
  Synthetic oligonucleotide
augcaaccaguuuauccaa

SEQ ID NO: 2751 - RNA, 19 nt, Artificial Sequence
  Synthetic oligonucleotide
uuggauaaacugguugcau

SEQ ID NO: 2752 - RNA, 19 nt, Artificial Sequence
  Synthetic oligonucleotide
ccaguuuauccaccaagaa

SEQ ID NO: 2753 - RNA, 19 nt, Artificial Sequence
  Synthetic oligonucleotide
uucuugguggauaaacugg

SEQ ID NO: 2754 - RNA, 19 nt, Artificial Sequence
  Synthetic oligonucleotide
aguuuauccaccaagaaca

SEQ ID NO: 2755 - RNA, 19 nt, Artificial Sequence
  Synthetic oligonucleotide
uguucuugguggauaaacu

SEQ ID NO: 2756 - RNA, 19 nt, Artificial Sequence
  Synthetic oligonucleotide
uuauccaccaagaacauaa

SEQ ID NO: 2757 - RNA, 19 nt, Artificial Sequence
  Synthetic oligonucleotide
uuauguucuugguggauaa

SEQ ID NO: 2758 - RNA, 19 nt, Artificial Sequence
  Synthetic oligonucleotide
uauccaccaagaacauaaa

SEQ ID NO: 2759 - RNA, 19 nt, Artificial Sequence
  Synthetic oligonucleotide
uuuauguucuugguggaua

SEQ ID NO: 2760 - RNA, 19 nt, Artificial Sequence
  Synthetic oligonucleotide
auccaccaagaacauaaga

SEQ ID NO: 2761 - RNA, 19 nt, Artificial Sequence
  Synthetic oligonucleotide
ucuuauguucuugguggau

SEQ ID NO: 2762 - RNA, 19 nt, Artificial Sequence
  Synthetic oligonucleotide
uccaccaagaacauaagaa

SEQ ID NO: 2763 - RNA, 19 nt, Artificial Sequence
  Synthetic oligonucleotide
uucuuauguucuuggugga

SEQ ID NO: 2764 - RNA, 19 nt, Artificial Sequence
  Synthetic oligonucleotide
ccaccaagaacauaagaaa

SEQ ID NO: 2765 - RNA, 19 nt, Artificial Sequence
  Synthetic oligonucleotide
uuucuuauguucuuggugg

SEQ ID NO: 2766 - RNA, 19 nt, Artificial Sequence
  Synthetic oligonucleotide
caccaagaacauaagaaua

SEQ ID NO: 2767 - RNA, 19 nt, Artificial Sequence
  Synthetic oligonucleotide
uauucuuauguucuuggug

SEQ ID NO: 2768 - RNA, 19 nt, Artificial Sequence
  Synthetic oligonucleotide
accaagaacauaagaauua

SEQ ID NO: 2769 - RNA, 19 nt, Artificial Sequence
  Synthetic oligonucleotide
uaauucuuauguucuuggu

SEQ ID NO: 2770 - RNA, 19 nt, Artificial Sequence
  Synthetic oligonucleotide
uaaguagaaagaauuggca

SEQ ID NO: 2771 - RNA, 19 nt, Artificial Sequence
  Synthetic oligonucleotide
ugccaauucuuucuacuua

SEQ ID NO: 2772 - RNA, 19 nt, Artificial Sequence
  Synthetic oligonucleotide
aguagaaagaauuggccaa

SEQ ID NO: 2773 - RNA, 19 nt, Artificial Sequence
  Synthetic oligonucleotide
uuggccaauucuuucuacu

SEQ ID NO: 2774 - RNA, 19 nt, Artificial Sequence
  Synthetic oligonucleotide
auaaaguacaucucuacua

SEQ ID NO: 2775 - RNA, 19 nt, Artificial Sequence
  Synthetic oligonucleotide
uaguagagauguacuuuau

SEQ ID NO: 2776 - RNA, 19 nt, Artificial Sequence
  Synthetic oligonucleotide
aaugagccgagaucacgua

SEQ ID NO: 2777 - RNA, 19 nt, Artificial Sequence
  Synthetic oligonucleotide
uacgugaucucggcucauu

SEQ ID NO: 2778 - RNA, 19 nt, Artificial Sequence
  Synthetic oligonucleotide
gaaauagaauuaucaagca

SEQ ID NO: 2779 - RNA, 19 nt, Artificial Sequence
  Synthetic oligonucleotide
ugcuugauaauucuauuuc

SEQ ID NO: 2780 - RNA, 19 nt, Artificial Sequence
  Synthetic oligonucleotide
aauagaauuaucaagcuua

SEQ ID NO: 2781 - RNA, 19 nt, Artificial Sequence
  Synthetic oligonucleotide
uaagcuugauaauucuauu

SEQ ID NO: 2782 - RNA, 19 nt, Artificial Sequence
  Synthetic oligonucleotide
uagaauuaucaagcuuuua

SEQ ID NO: 2783 - RNA, 19 nt, Artificial Sequence
  Synthetic oligonucleotide
uaaaagcuugauaauucua

SEQ ID NO: 2784 - RNA, 19 nt, Artificial Sequence
  Synthetic oligonucleotide
agaauuaucaagcuuuuaa

SEQ ID NO: 2785 - RNA, 19 nt, Artificial Sequence
  Synthetic oligonucleotide
uuaaaagcuugauaauucu

SEQ ID NO: 2786 - RNA, 19 nt, Artificial Sequence
  Synthetic oligonucleotide
gaauuaucaagcuuuuaaa

SEQ ID NO: 2787 - RNA, 19 nt, Artificial Sequence
  Synthetic oligonucleotide
uuuaaaagcuugauaauuc

SEQ ID NO: 2788 - RNA, 19 nt, Artificial Sequence
  Synthetic oligonucleotide
aauuaucaagcuuuuaaaa

SEQ ID NO: 2789 - RNA, 19 nt, Artificial Sequence
  Synthetic oligonucleotide
uuuuaaaagcuugauaauu

SEQ ID NO: 2790 - RNA, 19 nt, Artificial Sequence
  Synthetic oligonucleotide
uagagcacagaaggaauaa

SEQ ID NO: 2791 - RNA, 19 nt, Artificial Sequence
  Synthetic oligonucleotide
uuauuccuucugugcucua

SEQ ID NO: 2792 - RNA, 19 nt, Artificial Sequence
  Synthetic oligonucleotide
gcacagaaggaauaaggua

SEQ ID NO: 2793 - RNA, 19 nt, Artificial Sequence
  Synthetic oligonucleotide
uaccuuauuccuucugugc

SEQ ID NO: 2794 - RNA, 19 nt, Artificial Sequence
  Synthetic oligonucleotide
cacagaaggaauaagguca

SEQ ID NO: 2795 - RNA, 19 nt, Artificial Sequence
  Synthetic oligonucleotide
ugaccuuauuccuucugug

SEQ ID NO: 2796 - RNA, 19 nt, Artificial Sequence
  Synthetic oligonucleotide
acagaaggaauaaggucaa

SEQ ID NO: 2797 - RNA, 19 nt, Artificial Sequence
  Synthetic oligonucleotide
uugaccuuauuccuucugu

SEQ ID NO: 2798 - RNA, 19 nt, Artificial Sequence
  Synthetic oligonucleotide
cagaaggaauaaggucaua

SEQ ID NO: 2799 - RNA, 19 nt, Artificial Sequence
  Synthetic oligonucleotide
uaugaccuuauuccuucug

SEQ ID NO: 2800 - RNA, 19 nt, Artificial Sequence
  Synthetic oligonucleotide
agaaggaauaaggucauga

SEQ ID NO: 2801 - RNA, 19 nt, Artificial Sequence
  Synthetic oligonucleotide
ucaugaccuuauuccuucu

SEQ ID NO: 2802 - RNA, 19 nt, Artificial Sequence
  Synthetic oligonucleotide
gaaggaauaaggucaugaa

SEQ ID NO: 2803 - RNA, 19 nt, Artificial Sequence
  Synthetic oligonucleotide
uucaugaccuuauuccuuc

SEQ ID NO: 2804 - RNA, 19 nt, Artificial Sequence
  Synthetic oligonucleotide
aaggaauaaggucaugaaa

SEQ ID NO: 2805 - RNA, 19 nt, Artificial Sequence
  Synthetic oligonucleotide
uuucaugaccuuauuccuu

SEQ ID NO: 2806 - RNA, 19 nt, Artificial Sequence
  Synthetic oligonucleotide
aggaauaaggucaugaaaa

SEQ ID NO: 2807 - RNA, 19 nt, Artificial Sequence
  Synthetic oligonucleotide
uuuucaugaccuuauuccu

SEQ ID NO: 2808 - RNA, 19 nt, Artificial Sequence
  Synthetic oligonucleotide
ggaauaaggucaugaaaua

SEQ ID NO: 2809 - RNA, 19 nt, Artificial Sequence
  Synthetic oligonucleotide
uauuucaugaccuuauucc

SEQ ID NO: 2810 - RNA, 19 nt, Artificial Sequence
  Synthetic oligonucleotide
aauaaggucaugaaauuua

SEQ ID NO: 2811 - RNA, 19 nt, Artificial Sequence
  Synthetic oligonucleotide
uaaauuucaugaccuuauu

SEQ ID NO: 2812 - RNA, 19 nt, Artificial Sequence
  Synthetic oligonucleotide
auaaggucaugaaauuuaa

SEQ ID NO: 2813 - RNA, 19 nt, Artificial Sequence
  Synthetic oligonucleotide
uuaaauuucaugaccuuau

SEQ ID NO: 2814 - RNA, 19 nt, Artificial Sequence
  Synthetic oligonucleotide
gaaauuuaaaagguuaaaa

SEQ ID NO: 2815 - RNA, 19 nt, Artificial Sequence
  Synthetic oligonucleotide
uuuuaaccuuuuaaauuuc

SEQ ID NO: 2816 - RNA, 19 nt, Artificial Sequence
  Synthetic oligonucleotide
gguuaaauauugucauaga

SEQ ID NO: 2817 - RNA, 19 nt, Artificial Sequence
  Synthetic oligonucleotide
ucuaugacaauauuuaacc

SEQ ID NO: 2818 - RNA, 19 nt, Artificial Sequence
  Synthetic oligonucleotide
uuaaauauugucauaggaa

SEQ ID NO: 2819 - RNA, 19 nt, Artificial Sequence
  Synthetic oligonucleotide
uuccuaugacaauauuuaa

SEQ ID NO: 2820 - RNA, 19 nt, Artificial Sequence
  Synthetic oligonucleotide
aauauugucauaggauuaa

SEQ ID NO: 2821 - RNA, 19 nt, Artificial Sequence
  Synthetic oligonucleotide
uuaauccuaugacaauauu

SEQ ID NO: 2822 - RNA, 19 nt, Artificial Sequence
  Synthetic oligonucleotide
uauugucauaggauuaaga

SEQ ID NO: 2823 - RNA, 19 nt, Artificial Sequence
  Synthetic oligonucleotide
ucuuaauccuaugacaaua

SEQ ID NO: 2824 - RNA, 19 nt, Artificial Sequence
  Synthetic oligonucleotide
uugucauaggauuaagcaa

SEQ ID NO: 2825 - RNA, 19 nt, Artificial Sequence
  Synthetic oligonucleotide
uugcuuaauccuaugacaa

SEQ ID NO: 2826 - RNA, 19 nt, Artificial Sequence
  Synthetic oligonucleotide
gucauaggauuaagcagua

SEQ ID NO: 2827 - RNA, 19 nt, Artificial Sequence
  Synthetic oligonucleotide
uacugcuuaauccuaugac

SEQ ID NO: 2828 - RNA, 19 nt, Artificial Sequence
  Synthetic oligonucleotide
uaggauuaagcaguuuaaa

SEQ ID NO: 2829 - RNA, 19 nt, Artificial Sequence
  Synthetic oligonucleotide
uuuaaacugcuuaauccua

SEQ ID NO: 2830 - RNA, 19 nt, Artificial Sequence
  Synthetic oligonucleotide
uuaagcaguuuaaagauua

SEQ ID NO: 2831 - RNA, 19 nt, Artificial Sequence
  Synthetic oligonucleotide
uaaucuuuaaacugcuuaa

SEQ ID NO: 2832 - RNA, 19 nt, Artificial Sequence
  Synthetic oligonucleotide
agcaguuuaaagauuguua

SEQ ID NO: 2833 - RNA, 19 nt, Artificial Sequence
  Synthetic oligonucleotide
uaacaaucuuuaaacugcu

SEQ ID NO: 2834 - RNA, 19 nt, Artificial Sequence
  Synthetic oligonucleotide
gcaguuuaaagauuguuga

SEQ ID NO: 2835 - RNA, 19 nt, Artificial Sequence
  Synthetic oligonucleotide
ucaacaaucuuuaaacugc

SEQ ID NO: 2836 - RNA, 19 nt, Artificial Sequence
  Synthetic oligonucleotide
caguuuaaagauuguugga

SEQ ID NO: 2837 - RNA, 19 nt, Artificial Sequence
  Synthetic oligonucleotide
uccaacaaucuuuaaacug

SEQ ID NO: 2838 - RNA, 19 nt, Artificial Sequence
  Synthetic oligonucleotide
guuuaaagauuguuggaua

SEQ ID NO: 2839 - RNA, 19 nt, Artificial Sequence
  Synthetic oligonucleotide
uauccaacaaucuuuaaac

SEQ ID NO: 2840 - RNA, 19 nt, Artificial Sequence
  Synthetic oligonucleotide
uuaaagauuguuggaugaa

SEQ ID NO: 2841 - RNA, 19 nt, Artificial Sequence
  Synthetic oligonucleotide
uucauccaacaaucuuuaa

SEQ ID NO: 2842 - RNA, 19 nt, Artificial Sequence
  Synthetic oligonucleotide
gauuguuggaugaaauuaa

SEQ ID NO: 2843 - RNA, 19 nt, Artificial Sequence
  Synthetic oligonucleotide
uuaauuucauccaacaauc

SEQ ID NO: 2844 - RNA, 19 nt, Artificial Sequence
  Synthetic oligonucleotide
uuggaugaaauuauuugua

SEQ ID NO: 2845 - RNA, 19 nt, Artificial Sequence
  Synthetic oligonucleotide
uacaaauaauuucauccaa

SEQ ID NO: 2846 - RNA, 19 nt, Artificial Sequence
  Synthetic oligonucleotide
gaugaaauuauuugucaua

SEQ ID NO: 2847 - RNA, 19 nt, Artificial Sequence
  Synthetic oligonucleotide
uaugacaaauaauuucauc

SEQ ID NO: 2848 - RNA, 19 nt, Artificial Sequence
  Synthetic oligonucleotide
uauuugucauucauucaaa

SEQ ID NO: 2849 - RNA, 19 nt, Artificial Sequence
  Synthetic oligonucleotide
uuugaaugaaugacaaaua

SEQ ID NO: 2850 - RNA, 19 nt, Artificial Sequence
  Synthetic oligonucleotide
ugucauucauucaaguaaa

SEQ ID NO: 2851 - RNA, 19 nt, Artificial Sequence
  Synthetic oligonucleotide
uuuacuugaaugaaugaca

SEQ ID NO: 2852 - RNA, 19 nt, Artificial Sequence
  Synthetic oligonucleotide
gucauucauucaaguaaua

SEQ ID NO: 2853 - RNA, 19 nt, Artificial Sequence
  Synthetic oligonucleotide
uauuacuugaaugaaugac

SEQ ID NO: 2854 - RNA, 19 nt, Artificial Sequence
  Synthetic oligonucleotide
auucauucaaguaauaaaa

SEQ ID NO: 2855 - RNA, 19 nt, Artificial Sequence
  Synthetic oligonucleotide
uuuuauuacuugaaugaau

SEQ ID NO: 2856 - RNA, 19 nt, Artificial Sequence
  Synthetic oligonucleotide
uucauucaaguaauaaaua

SEQ ID NO: 2857 - RNA, 19 nt, Artificial Sequence
  Synthetic oligonucleotide
uauuuauuacuugaaugaa

SEQ ID NO: 2858 - RNA, 19 nt, Artificial Sequence
  Synthetic oligonucleotide
ucaaguaauaaauauuuaa

SEQ ID NO: 2859 - RNA, 19 nt, Artificial Sequence
  Synthetic oligonucleotide
uuaaauauuuauuacuuga

SEQ ID NO: 2860 - RNA, 19 nt, Artificial Sequence
  Synthetic oligonucleotide
caaguaauaaauauuuaaa

SEQ ID NO: 2861 - RNA, 19 nt, Artificial Sequence
  Synthetic oligonucleotide
uuuaaauauuuauuacuug

SEQ ID NO: 2862 - RNA, 19 nt, Artificial Sequence
  Synthetic oligonucleotide
aguaauaaauauuuaauga

SEQ ID NO: 2863 - RNA, 19 nt, Artificial Sequence
  Synthetic oligonucleotide
ucauuaaauauuuauuacu

SEQ ID NO: 2864 - RNA, 19 nt, Artificial Sequence
  Synthetic oligonucleotide
guaauaaauauuuaaugaa

SEQ ID NO: 2865 - RNA, 19 nt, Artificial Sequence
  Synthetic oligonucleotide
uucauuaaauauuuauuac

SEQ ID NO: 2866 - RNA, 19 nt, Artificial Sequence
  Synthetic oligonucleotide
aaauauuuaaugaauacua

SEQ ID NO: 2867 - RNA, 19 nt, Artificial Sequence
  Synthetic oligonucleotide
uaguauucauuaaauauuu

SEQ ID NO: 2868 - RNA, 19 nt, Artificial Sequence
  Synthetic oligonucleotide
uaaugaauacuugcuauaa

SEQ ID NO: 2869 - RNA, 19 nt, Artificial Sequence
  Synthetic oligonucleotide
uuauagcaaguauucauua

SEQ ID NO: 2870 - RNA, 19 nt, Artificial Sequence
  Synthetic oligonucleotide
aaugaauacuugcuauaaa

SEQ ID NO: 2871 - RNA, 19 nt, Artificial Sequence
  Synthetic oligonucleotide
uuuauagcaaguauucauu

SEQ ID NO: 2872 - RNA, 19 nt, Artificial Sequence
  Synthetic oligonucleotide
augaauacuugcuauaaaa

SEQ ID NO: 2873 - RNA, 19 nt, Artificial Sequence
  Synthetic oligonucleotide
uuuuauagcaaguauucau

1. A double-stranded ribonucleic acid (dsRNA), wherein the dsRNA comprises a sense strand and an antisense strand, wherein the antisense strand is complementary to at least 15 contiguous nucleobases of an MSH3 gene, and wherein the dsRNA comprises a duplex structure of between 15 and 30 linked nucleosides in length.

2. A dsRNA for reducing expression of MSH3 in a cell, wherein the dsRNA comprises a sense strand and an antisense strand, wherein the antisense strand is complementary to at least 15 contiguous nucleobases of an MSH3 gene, and wherein the dsRNA comprises a duplex structure of between 15 and 30 linked nucleosides in length.

3. The dsRNA of claim 1 or 2 comprising a duplex structure of between 19 and 23 linked nucleosides in length.

4. The dsRNA of any one of claims 1-3, further comprising a loop region joining the sense strand and antisense strand, wherein the loop region is characterized by a lack of base pairing between nucleobases within the loop region.

5. The dsRNA of any one of claims 1-4, wherein the region the sense or antisense strand is complementary to at least 15 contiguous nucleotides of an MSH3 gene corresponding to a sequence of reference mRNA NM_002439.4 at one or more of positions 566-589, 678-701, 875-989, 1019-1088, 1370-1393, 1466-1569, 1721-1849, 1879-2038, 2086-2171, 2783-2806, 2847-2922, 3043-3119, 3241-3314, 3330-3353, or 3701-3792 of the MSH3 gene.

6. The dsRNA of any one of claims 1-4, wherein the region the sense or antisense strand is complementary to at least 15 contiguous nucleotides of an MSH3 gene corresponding to a sequence of reference mRNA NM_002439.4 at one or more of positions 876-989, 1019-1088, 1370-1393, 1889-1938, or 3241-3314 of the MSH3 gene.

7. The dsRNA of any one of claims 1-4, wherein the region the sense or antisense strand is complementary to at least 15 contiguous nucleotides of an MSH3 gene corresponding to a sequence of reference mRNA NM_002439.4 at one or more of positions 876-989, 1019-1088, 1370-1393, 1466-1569, 1756-1849, 1879-2038, 2086-2171, 2783-2806, 2847-2922, 3043-3119, 3241-3314, 3330-3353, or 3701-3792 of the MSH3 gene.

8. The dsRNA of any one of claims 1-4, wherein the region the sense or antisense strand is complementary to at least 15 contiguous nucleotides of an MSH3 gene corresponding to a sequence of reference mRNA NM_002439.4 at one or more of positions 678-701, 875-989, 1019-1088, 1370-1393, 1466-1569, 1721-1849, 1879-2038, 2086-2171, 2783-2806, 2847-2922, 3043-3119, 3241-3314, 3330-3353, or 3701-3792 of the MSH3 gene.

9. The dsRNA of any one of claims 1-4, wherein the region the sense or antisense strand is complementary to at least 15 contiguous nucleotides of an MSH3 gene corresponding to a sequence of reference mRNA NM_002439.4 at position 879-921 of the MSH3 gene.

10. The dsRNA of any one of claims 1-4, wherein the region the sense or antisense strand is complementary to at least 15 contiguous nucleotides of an MSH3 gene corresponding to a sequence of reference mRNA NM_002439.4 at one or more of positions 875-989, 1019-1088, 1370-1393, 1466-1569, 1721-1849, 1879-1970, 2783-2806, 2847-2922, 3043-3119, 3241-3314, 3330-3353, or 3703-3792 of the MSH3 gene.

11. The dsRNA of any one of claims 1-4, wherein the region the sense or antisense strand is complementary to at least 15 contiguous nucleotides of an MSH3 gene corresponding to a sequence of reference mRNA NM_002439.4 at one or more of positions 566-589, 678-701, 875-989, 1019-1088, 1370-1393, 1466-1569, 1721-1849, 1879-2038, 2086-2171, 2783-2806, 2847-2922, 3043-3119, 3241-3314, 3330-3353, or 3701-3792 of the MSH3 gene.

12. The dsRNA of any one of claims 1-4, wherein the antisense strand comprises an antisense nucleobase sequence selected from Table 3, wherein the 5′ nucleotide represented by U can be any nucleotide (e.g., U, A, C, G), and the sense strand comprises a sense nucleobase sequence complementary to the antisense nucleobase sequence.

13. The dsRNA of any one of claims 1-4, wherein the antisense nucleobase sequence consists of an antisense strand in Table 3, wherein the 5′ nucleotide represented by U can be any nucleotide (e.g., U, A, C, G), and the sense nucleobase sequence consists of a sequence complementary to the antisense nucleobase sequence.

14. The dsRNA of any one of claims 1-4, wherein the sense strand comprises a sense nucleobase sequence selected from Table 3, and the antisense strand comprises an antisense nucleobase sequence complementary to the sense nucleobase sequence.

15. The dsRNA of any one of claims 1-4, wherein the sense nucleobase sequence consists of a sense strand in Table 3, and the antisense nucleobase sequence consists of a sequence complementary to the sense nucleobase sequence.

16. The dsRNA of any one of claims 1-4, wherein the sense strand comprises a sense nucleobase sequence selected from Tables 4-10, and the antisense strand comprises an antisense nucleobase sequence complementary to the sense nucleobase sequence.

17. The dsRNA of any one of claims 1-4, wherein the sense nucleobase sequence consists of a sense strand in any one of Tables 4-10, and the antisense nucleobase sequence consists of a sequence complementary to the sense nucleobase sequence.

18. The dsRNA of any one of claims 1-4, wherein the antisense strand comprises an antisense nucleobase sequence selected from a list in Table 11, wherein the 5′ nucleotide represented by U can be any nucleotide (e.g., U, A, C, G), and the sense strand comprises a sense nucleobase sequence complementary to the antisense nucleobase sequence.

19. The dsRNA of any one of claims 1-4, wherein the antisense nucleobase sequence consists of an antisense sense strand in Table 11, wherein the 5′ nucleotide represented by U can be any nucleotide (e.g., U, A, C, G), and the sense nucleobase sequence consists of a sequence complementary to the antisense nucleobase sequence.

20. The dsRNA of any one of claims 1-4, wherein the sense strand comprises a sense nucleobase sequence selected from Table 11, and the antisense strand comprises an antisense nucleobase sequence complementary to the sense nucleobase sequence.

21. The dsRNA of any one of claims 1-4, wherein the sense nucleobase sequence consists of a sense strand in Table 11, and the antisense nucleobase sequence consists of a sequence complementary to the sense nucleobase sequence.

22. The dsRNA of any one of claims 1-21, wherein the dsRNA comprises at least one alternative nucleobase, at least one alternative internucleoside linkage, at least one alternative sugar moiety, or a combination thereof.

23. The dsRNA of claim 22, wherein at least one alternative internucleoside linkage is a phosphorothioate internucleoside linkage.

24. The dsRNA of claim 22, wherein at least one alternative internucleoside linkage is a 2′-alkoxy internucleoside linkage.

25. The dsRNA of claim 22, wherein at least one alternative internucleoside linkage is an alkyl phosphate internucleoside linkage.

26. The dsRNA of claim 22, wherein at least one alternative nucleobase is 5′-methylcytosine, pseudouridine, or 5-methoxyuridine.

27. The dsRNA of claim 22, wherein at least one alternative sugar moiety is 2′-OMe or a bicyclic nucleic acid.

28. The dsRNA of claim 22, wherein the dsRNA comprises at least one 2′-OMe sugar moiety and at least one phosphorothioate internucleoside linkage.

29. The dsRNA of any one of claims 1-28, wherein the dsRNA further comprises a ligand conjugated to the 3′ end of the sense strand through a monovalent or branched bivalent or trivalent linker.

30. The dsRNA of any one of claims 1-29, wherein the sense strand comprises a nucleobase sequence of any one of SEQ ID NOs: 140, 156, 234, 240, 246, 380, 382, 386, 388, 396, 406, 418, 464, 478, 520, 540, 564, 568, 750, 822, 830, 844, 868, 870, 874, 904, 1042, 1060, 1062, 1064, 1068, 1090, 1096, 1098, 1114, 1116, 1166, 1168, 1170, 1182, 1192, 1212, 1214, 1216, 1222, 1244, 1258, 1292, 1358, 1360, 1374, 1378, 1380, 1400, 1866, 1868, 1870, 1882, 1892, 1926, 1946, 1964, 1970, 2084, 2088, 2090, 2094, 2124, 2130, 2146, 2264, 2290, 2308, 2318, 2324, 2606, 2608, 2610, 2632, 2652, 2678, or 2690.

31. The dsRNA of any one of claims 1-29, wherein the sense strand comprises a nucleobase sequence of any one of SEQ ID NOs: 380, 382, 386, 388, 396, 406, 418, 464, 478, 520, 540, 564, 568, 750, 1166, 1168, 1170, 1182, 1192, 1212, 1214, 1216, 1222, 2264, 2290, 2308, or 2318.

32. The dsRNA of any one of claims 1-29, wherein the sense strand comprises a nucleobase sequence of any one of SEQ ID NOs: 380, 382, 386, 388, 396, 406, 418, 464, 478, 520, 540, 564, 568, 750, 822, 830, 844, 868, 870, 874, 904, 1060, 1062, 1064, 1068, 1090, 1096, 1098, 1114, 1116, 1166, 1168, 1170, 1182, 1192, 1212, 1214, 1216, 1222, 1244, 1258, 1292, 1358, 1360, 1374, 1378, 1380, 1400, 1866, 1868, 1870, 1882, 1892, 1926, 1946, 1964, 1970, 2084, 2088, 2090, 2094, 2124, 2130, 2146, 2264, 2290, 2308, 2318, 2324, 2606, 2608, 2610, 2632, 2652, 2678, or 2690.

33. The dsRNA of any one of claims 1-29, wherein the sense strand comprises a nucleobase sequence of any one of SEQ ID NOs: 234, 240, 246, 380, 382, 386, 388, 396, 406, 418, 464, 478, 520, 540, 564, 568, 750, 822, 830, 844, 868, 870, 874, 904, 1042, 1060, 1062, 1064, 1068, 1090, 1096, 1098, 1114, 1116, 1166, 1168, 1170, 1182, 1192, 1212, 1214, 1216, 1222, 1244, 1258, 1292, 1358, 1360, 1374, 1378, 1380, 1400, 1866, 1868, 1870, 1882, 1892, 1926, 1946, 1964, 1970, 2084, 2088, 2090, 2094, 2124, 2130, 2146, 2264, 2290, 2308, 2318, 2324, 2606, 2608, 2610, 2632, 2652, 2678, or 2690.

34. The dsRNA of any one of claims 1-29, wherein the sense strand comprises a nucleobase sequence of any one of SEQ ID NOs: 380, 382, 386, 388, 396, 406, 418, 464, 478, 520, 540, 564, 568, 750, 822, 830, 844, 868, 870, 874, 904, 1042, 1060, 1062, 1064, 1068, 1090, 1096, 1098, 1114, 1116, 1166, 1168, 1170, 1182, 1192, 1212, 1214, 1216, 1222, 1244, 1866, 1868, 1870, 1882, 1892, 1926, 1946, 1964, 1970, 2084, 2088, 2090, 2094, 2124, 2130, 2146, 2264, 2290, 2308, 2318, 2324, 2606, 2608, 2610, 2632, 2652, 2678, or 2690.

35. The dsRNA of any one of claims 1-29, wherein the sense strand comprises a nucleobase sequence of any one of SEQ ID NOs: 140, 156, 234, 240, 246, 380, 382, 386, 388, 396, 406, 418, 464, 478, 520, 540, 564, 568, 750, 822, 830, 844, 868, 870, 874, 904, 1042, 1060, 1062, 1064, 1068, 1090, 1096, 1098, 1114, 1116, 1166, 1168, 1170, 1182, 1192, 1212, 1214, 1216, 1222, 1244, 1258, 1292, 1358, 1360, 1374, 1378, 1380, 1400, 1866, 1868, 1870, 1882, 1892, 1926, 1946, 1964, 1970, 2084, 2088, 2090, 2094, 2124, 2130, 2146, 2264, 2290, 2308, 2318, 2324, 2606, 2608, 2610, 2632, 2652, 2678, or 2690.

36. The dsRNA of any one of claims 1-29, wherein the antisense strand comprises a nucleobase sequence of any one of SEQ ID NOs: 141, 157, 235, 241, 247, 381, 383, 387, 389, 397, 407, 419, 465, 479, 521, 541, 565, 569, 751, 823, 831, 845, 869, 871, 875, 905, 1043, 1061, 1063, 1065, 1069, 1091, 1097, 1099, 1115, 1117, 1167, 1169, 1171, 1183, 1193, 1213, 1215, 1217, 1223, 1245, 1259, 1293, 1359, 1361, 1375, 1379, 1381, 1401, 1867, 1869, 1871, 1883, 1893, 1927, 1947, 1965, 1971, 2085, 2089, 2091, 2095, 2125, 2131, 2147, 2265, 2291, 2309, 2319, 2325, 2607, 2609, 2611, 2633, 2653, 2679, or 2691, wherein the 5′ nucleotide represented by U can be any nucleotide (e.g., U, A, C, G).

37. The dsRNA of any one of claims 1-29, wherein the antisense strand comprises a nucleobase sequence of any one of SEQ ID NOs: 381, 383, 387, 389, 397, 407, 419, 465, 479, 521, 541, 565, 569, 751, 1167, 1169, 1171, 1183, 1193, 1213, 1215, 1217, 1223, 2265, 2291, 2309, or 2319, wherein the 5′ nucleotide represented by U can be any nucleotide (e.g., U, A, C, G).

38. The dsRNA of any one of claims 1-29, wherein the antisense strand comprises a nucleobase sequence of any one of SEQ ID NOs:381, 383, 387, 389, 397, 407, 419, 465, 479, 521, 541, 565, 569, 751, 823, 831, 845, 869, 871, 875, 905, 1061, 1063, 1065, 1069, 1091, 1097, 1099, 1115, 1117, 1167, 1169, 1171, 1183, 1193, 1213, 1215, 1217, 1223, 1245, 1259, 1293, 1359, 1361, 1375, 1379, 1381, 1401, 1867, 1869, 1871, 1883, 1893, 1927, 1947, 1965, 1971, 2085, 2089, 2091, 2095, 2125, 2131, 2147, 2265, 2291, 2309, 2319, 2325, 2607, 2609, 2611, 2633, 2653, 2679, or 2691, wherein the 5′ nucleotide represented by U can be any nucleotide (e.g., U, A, C, G).

39. The dsRNA of any one of claims 1-29, wherein the antisense strand comprises a nucleobase sequence of any one of SEQ ID NOs: 235, 241, 247, 381, 383, 387, 389, 397, 407, 419, 465, 479, 521, 541, 565, 569, 751, 823, 831, 845, 869, 871, 875, 905, 1043, 1061, 1063, 1065, 1069, 1091, 1097, 1099, 1115, 1117, 1167, 1169, 1171, 1183, 1193, 1213, 1215, 1217, 1223, 1245, 1259, 1293, 1359, 1361, 1375, 1379, 1381, 1401, 1867, 1869, 1871, 1883, 1893, 1927, 1947, 1965, 1971, 2085, 2089, 2091, 2095, 2125, 2131, 2147, 2265, 2291, 2309, 2319, 2325, 2607, 2609, 2611, 2633, 2653, 2679, or 2691, wherein the 5′ nucleotide represented by U can be any nucleotide (e.g., U, A, C, G).

40. The dsRNA of any one of claims 1-29, wherein the antisense strand comprises a nucleobase sequence of any one of SEQ ID NOs: 381, 383, 387, 389, 397, 407, 419, 465, 479, 521, 541, 565, 569, 751, 823, 831, 845, 869, 871, 875, 905, 1043, 1061, 1063, 1065, 1069, 1091, 1097, 1099, 1115, 1117, 1167, 1169, 1171, 1183, 1193, 1213, 1215, 1217, 1223, 1245, 1867, 1869, 1871, 1883, 1893, 1927, 1947, 1965, 1971, 2085, 2089, 2091, 2095, 2125, 2131, 2147, 2265, 2291, 2309, 2319, 2325, 2607, 2609, 2611, 2633, 2653, 2679, or 2691, wherein the 5′ nucleotide represented by U can be any nucleotide (e.g., U, A, C, G).

41. The dsRNA of any one of claims 1-29, wherein the antisense strand comprises a nucleobase sequence of any one of SEQ ID NOs: 141, 157, 235, 241, 247, 381, 383, 387, 389, 397, 407, 419, 465, 479, 521, 541, 565, 569, 751, 823, 831, 845, 869, 871, 875, 905, 1043, 1061, 1063, 1065, 1069, 1091, 1097, 1099, 1115, 1117, 1167, 1169, 1171, 1183, 1193, 1213, 1215, 1217, 1223, 1245, 1259, 1293, 1359, 1361, 1375, 1379, 1381, 1401, 1867, 1869, 1871, 1883, 1893, 1927, 1947, 1965, 1971, 2085, 2089, 2091, 2095, 2125, 2131, 2147, 2265, 2291, 2309, 2319, 2325, 2607, 2609, 2611, 2633, 2653, 2679, or 2691, wherein the 5′ nucleotide represented by U can be any nucleotide (e.g., U, A, C, G).

42. The dsRNA of any one of claims 1-29, wherein the sense strand consists of a nucleobase sequence of any one of SEQ ID NOs: 140, 156, 234, 240, 246, 380, 382, 386, 388, 396, 406, 418, 464, 478, 520, 540, 564, 568, 750, 822, 830, 844, 868, 870, 874, 904, 1042, 1060, 1062, 1064, 1068, 1090, 1096, 1098, 1114, 1116, 1166, 1168, 1170, 1182, 1192, 1212, 1214, 1216, 1222, 1244, 1258, 1292, 1358, 1360, 1374, 1378, 1380, 1400, 1866, 1868, 1870, 1882, 1892, 1926, 1946, 1964, 1970, 2084, 2088, 2090, 2094, 2124, 2130, 2146, 2264, 2290, 2308, 2318, 2324, 2606, 2608, 2610, 2632, 2652, 2678, or 2690.

43. The dsRNA of any one of claims 1-29, wherein the sense strand consists of a nucleobase sequence of any one of SEQ ID NOs: 380, 382, 386, 388, 396, 406, 418, 464, 478, 520, 540, 564, 568, 750, 1166, 1168, 1170, 1182, 1192, 1212, 1214, 1216, 1222, 2264, 2290, 2308, or 2318.

44. The dsRNA of any one of claims 1-29, wherein the sense strand consists of a nucleobase sequence of any one of SEQ ID NOs: 380, 382, 386, 388, 396, 406, 418, 464, 478, 520, 540, 564, 568, 750, 822, 830, 844, 868, 870, 874, 904, 1060, 1062, 1064, 1068, 1090, 1096, 1098, 1114, 1116, 1166, 1168, 1170, 1182, 1192, 1212, 1214, 1216, 1222, 1244, 1258, 1292, 1358, 1360, 1374, 1378, 1380, 1400, 1866, 1868, 1870, 1882, 1892, 1926, 1946, 1964, 1970, 2084, 2088, 2090, 2094, 2124, 2130, 2146, 2264, 2290, 2308, 2318, 2324, 2606, 2608, 2610, 2632, 2652, 2678, or 2690.

45. The dsRNA of any one of claims 1-29, wherein the sense strand consists of a nucleobase sequence of any one of SEQ ID NOs: 234, 240, 246, 380, 382, 386, 388, 396, 406, 418, 464, 478, 520, 540, 564, 568, 750, 822, 830, 844, 868, 870, 874, 904, 1042, 1060, 1062, 1064, 1068, 1090, 1096, 1098, 1114, 1116, 1166, 1168, 1170, 1182, 1192, 1212, 1214, 1216, 1222, 1244, 1258, 1292, 1358, 1360, 1374, 1378, 1380, 1400, 1866, 1868, 1870, 1882, 1892, 1926, 1946, 1964, 1970, 2084, 2088, 2090, 2094, 2124, 2130, 2146, 2264, 2290, 2308, 2318, 2324, 2606, 2608, 2610, 2632, 2652, 2678, or 2690.

46. The dsRNA of any one of claims 1-29, wherein the sense strand consists of a nucleobase sequence of any one of SEQ ID NOs: 380, 382, 386, 388, 396, 406, 418, 464, 478, 520, 540, 564, 568, 750, 822, 830, 844, 868, 870, 874, 904, 1042, 1060, 1062, 1064, 1068, 1090, 1096, 1098, 1114, 1116, 1166, 1168, 1170, 1182, 1192, 1212, 1214, 1216, 1222, 1244, 1866, 1868, 1870, 1882, 1892, 1926, 1946, 1964, 1970, 2084, 2088, 2090, 2094, 2124, 2130, 2146, 2264, 2290, 2308, 2318, 2324, 2606, 2608, 2610, 2632, 2652, 2678, or 2690.

47. The dsRNA of any one of claims 1-29, wherein the sense strand consists of a nucleobase sequence of any one of SEQ ID NOs: 140, 156, 234, 240, 246, 380, 382, 386, 388, 396, 406, 418, 464, 478, 520, 540, 564, 568, 750, 822, 830, 844, 868, 870, 874, 904, 1042, 1060, 1062, 1064, 1068, 1090, 1096, 1098, 1114, 1116, 1166, 1168, 1170, 1182, 1192, 1212, 1214, 1216, 1222, 1244, 1258, 1292, 1358, 1360, 1374, 1378, 1380, 1400, 1866, 1868, 1870, 1882, 1892, 1926, 1946, 1964, 1970, 2084, 2088, 2090, 2094, 2124, 2130, 2146, 2264, 2290, 2308, 2318, 2324, 2606, 2608, 2610, 2632, 2652, 2678, or 2690.

48. The dsRNA of any one of claims 1-29, wherein the sense strand consists of a nucleobase sequence of any one of SEQ ID NOs: 141, 157, 235, 241, 247, 381, 383, 387, 389, 397, 407, 419, 465, 479, 521, 541, 565, 569, 751, 823, 831, 845, 869, 871, 875, 905, 1043, 1061, 1063, 1065, 1069, 1091, 1097, 1099, 1115, 1117, 1167, 1169, 1171, 1183, 1193, 1213, 1215, 1217, 1223, 1245, 1259, 1293, 1359, 1361, 1375, 1379, 1381, 1401, 1867, 1869, 1871, 1883, 1893, 1927, 1947, 1965, 1971, 2085, 2089, 2091, 2095, 2125, 2131, 2147, 2265, 2291, 2309, 2319, 2325, 2607, 2609, 2611, 2633, 2653, 2679, or 2691.

49. The dsRNA of any one of claims 1-29, wherein the antisense strand consists of a nucleobase sequence of any one of SEQ ID NOs: 381, 383, 387, 389, 397, 407, 419, 465, 479, 521, 541, 565, 569, 751, 1167, 1169, 1171, 1183, 1193, 1213, 1215, 1217, 1223, 2265, 2291, 2309, or 2319, wherein the 5′ nucleotide represented by U can be any nucleotide (e.g., U, A, C, G).

50. The dsRNA of any one of claims 1-29, wherein the antisense strand consists of a nucleobase sequence of any one of SEQ ID NOs: 381, 383, 387, 389, 397, 407, 419, 465, 479, 521, 541, 565, 569, 751, 823, 831, 845, 869, 871, 875, 905, 1061, 1063, 1065, 1069, 1091, 1097, 1099, 1115, 1117, 1167, 1169, 1171, 1183, 1193, 1213, 1215, 1217, 1223, 1245, 1259, 1293, 1359, 1361, 1375, 1379, 1381, 1401, 1867, 1869, 1871, 1883, 1893, 1927, 1947, 1965, 1971, 2085, 2089, 2091, 2095, 2125, 2131, 2147, 2265, 2291, 2309, 2319, 2325, 2607, 2609, 2611, 2633, 2653, 2679, or 2691, wherein the 5′ nucleotide represented by U can be any nucleotide (e.g., U, A, C, G).

51. The dsRNA of any one of claims 1-29, wherein the antisense strand consists of a nucleobase sequence of any one of SEQ ID NOs: 235, 241, 247, 381, 383, 387, 389, 397, 407, 419, 465, 479, 521, 541, 565, 569, 751, 823, 831, 845, 869, 871, 875, 905, 1043, 1061, 1063, 1065, 1069, 1091, 1097, 1099, 1115, 1117, 1167, 1169, 1171, 1183, 1193, 1213, 1215, 1217, 1223, 1245, 1259, 1293, 1359, 1361, 1375, 1379, 1381, 1401, 1867, 1869, 1871, 1883, 1893, 1927, 1947, 1965, 1971, 2085, 2089, 2091, 2095, 2125, 2131, 2147, 2265, 2291, 2309, 2319, 2325, 2607, 2609, 2611, 2633, 2653, 2679, or 2691, wherein the 5′ nucleotide represented by U can be any nucleotide (e.g., U, A, C, G).

52. The dsRNA of any one of claims 1-29, wherein the antisense strand consists of a nucleobase sequence of any one of SEQ ID NOs: 381, 383, 387, 389, 397, 407, 419, 465, 479, 521, 541, 565, 569, 751, 823, 831, 845, 869, 871, 875, 905, 1043, 1061, 1063, 1065, 1069, 1091, 1097, 1099, 1115, 1117, 1167, 1169, 1171, 1183, 1193, 1213, 1215, 1217, 1223, 1245, 1867, 1869, 1871, 1883, 1893, 1927, 1947, 1965, 1971, 2085, 2089, 2091, 2095, 2125, 2131, 2147, 2265, 2291, 2309, 2319, 2325, 2607, 2609, 2611, 2633, 2653, 2679, or 2691, wherein the 5′ nucleotide represented by U can be any nucleotide (e.g., U, A, C, G).

53. The dsRNA of any one of claims 1-29, wherein the antisense strand consists of a nucleobase sequence of any one of SEQ ID NOs: 141, 157, 235, 241, 247, 381, 383, 387, 389, 397, 407, 419, 465, 479, 521, 541, 565, 569, 751, 823, 831, 845, 869, 871, 875, 905, 1043, 1061, 1063, 1065, 1069, 1091, 1097, 1099, 1115, 1117, 1167, 1169, 1171, 1183, 1193, 1213, 1215, 1217, 1223, 1245, 1259, 1293, 1359, 1361, 1375, 1379, 1381, 1401, 1867, 1869, 1871, 1883, 1893, 1927, 1947, 1965, 1971, 2085, 2089, 2091, 2095, 2125, 2131, 2147, 2265, 2291, 2309, 2319, 2325, 2607, 2609, 2611, 2633, 2653, 2679, or 2691, wherein the 5′ nucleotide represented by U can be any nucleotide (e.g., U, A, C, G).

54. The dsRNA of any one of claims 1-53, wherein the dsRNA exhibits at least 50% mRNA inhibition at a 0.5 nM dsRNA concentration when determined using a cell assay when compared with a control cell.

55. The dsRNA of any one of claims 1-53, wherein the dsRNA exhibits at least 40% mRNA inhibition at a 0.5 nM dsRNA concentration when determined using a cell assay when compared with a control cell.

56. The dsRNA of any one of claims 1-53, wherein the dsRNA exhibits at least 30% mRNA inhibition at a 0.5 nM dsRNA concentration when determined using a cell assay when compared with a control cell.

57. The dsRNA of any one of claims 1-53, wherein the dsRNA exhibits at least 70% mRNA inhibition at a 10 nM dsRNA concentration when determined using a cell assay when compared with a control cell.

58. The dsRNA of any one of claims 1-53, wherein the dsRNA exhibits at least 60% mRNA inhibition at a 10 nM dsRNA concentration when determined using a cell assay when compared with a control cell.

59. The dsRNA of any one of claims 1-53, wherein the dsRNA exhibits at least 50% mRNA inhibition at a 10 nM dsRNA concentration when determined using a cell assay when compared with a control cell.

60. The dsRNA of any one of claims 1-59, wherein the antisense strand is complementary to at least 17 contiguous nucleotides of an MSH3 gene.

61. The dsRNA of any one of claims 1-59, wherein the antisense strand is complementary to at least 19 contiguous nucleotides of an MSH3 gene.

62. The dsRNA of any one of claims 1-59, wherein the antisense strand is complementary to 19 contiguous nucleotides of an MSH3 gene.

63. The dsRNA of any one of claims 1-59, wherein the sense strand is complementary to at least 17 contiguous nucleotides of an MSH3 gene.

64. The dsRNA of any one of claims 1-59, wherein the sense strand is complementary to at least 19 contiguous nucleotides of an MSH3 gene.

65. The dsRNA of any one of claims 1-59, wherein the sense strand is complementary to 19 contiguous nucleotides of an MSH3 gene.

66. The dsRNA of any one of claims 1-65, wherein the antisense strand and/or the sense strand comprises a 3′ overhang of at least 1 linked nucleoside; or a 3′ overhang of at least 2 linked nucleosides.

67. A pharmaceutical composition comprising one or more dsRNAs of any one of claims 1-66 and a pharmaceutically acceptable carrier.

68. A composition comprising one or more dsRNAs of any one of claims 1-66 and a lipid nanoparticle, a polyplex nanoparticle, a lipoplex nanoparticle, or a liposome.

69. A vector encoding at least one strand of the dsRNA of any one of claims 1-66.

70. A cell comprising the vector of claim 69.

71. A method of reducing transcription of MSH3 in a cell, the method comprising contacting the cell with the dsRNA of any one of claims 1-66, the pharmaceutical composition of claim 67, the composition of claim 68, the vector of claim 69, or the cell of claim 70 for a time sufficient to obtain degradation of an mRNA transcript of MSH3, thereby reducing expression of MSH3 in the cell.

72. A method of treating, preventing, or delaying progression of a nucleotide repeat expansion disorder in a subject in need thereof, the method comprising administering to the subject the dsRNA of any one of claims 1-66, the pharmaceutical composition of claim 67, the composition of claim 68, the vector of claim 69, or the cell of claim 70.

73. A method of reducing the level and/or activity of MSH3 in a cell of a subject identified as having a nucleotide repeat expansion disorder, the method comprising contacting the cell with the dsRNA of any one of claims 1-66, the pharmaceutical composition of claim 67, the composition of claim 68, the vector of claim 69, or the cell of claim 70.

74. A method for reducing expression of MSH3 in a cell comprising contacting the cell with the dsRNA of any one of claims 1-66, the pharmaceutical composition of claim 67, the composition of claim 68, the vector of claim 69, or the cell of claim 70 and maintaining the cell for a time sufficient to obtain degradation of an mRNA transcript of MSH3, thereby reducing expression of MSH3 in the cell.

75. A method of decreasing nucleotide repeat expansion in a cell, the method comprising contacting the cell with the dsRNA of any one of claims 1-66, the pharmaceutical composition of claim 67, the composition of claim 68, the vector of claim 69, or the cell of claim 70.

76. The method of claim 74 or 75, wherein the cell is in a subject.

77. The method of any one of claims 72, 73, and 76, wherein the subject is a human.

78. The method of any one of claims 71 and 73-76, wherein the cell is a cell of the central nervous system or a muscle cell.

79. The method of any one of claims 72, 73, and 76-78, wherein the subject is identified as having a nucleotide repeat expansion disorder.

80. The method of any one of claims 72, 73, and 75-79 wherein the nucleotide repeat expansion disorder is a polyglutamine disease.

81. The method of claim 80, wherein the polyglutamine disease is selected from the group consisting of dentatorubropallidoluysian atrophy, Huntington's disease, spinal and bulbar muscular atrophy, spinocerebellar ataxia type 1, spinocerebellar ataxia type 2, spinocerebellar ataxia type 3, spinocerebellar ataxia type 6, spinocerebellar ataxia type 7, spinocerebellar ataxia type 17, and Huntington's disease-like 2.

82. The method of any one of claims 72, 73, and 75-79, wherein the nucleotide repeat expansion disorder is a non-polyglutamine disease.

83. The method of claim 82, wherein the non-polyglutamine disease is selected from the group consisting of fragile X syndrome, fragile X-associated tremor/ataxia syndrome, fragile XE mental retardation, Friedreich's ataxia, myotonic dystrophy type 1, spinocerebellar ataxia type 8, spinocerebellar ataxia type 12, oculopharyngeal muscular dystrophy, Fragile X-associated premature ovarian failure, FRA2A syndrome, FRA7A syndrome, and early infantile epileptic encephalopathy.

84. A dsRNA of any one of claims 1-66, the pharmaceutical composition of claim 67, the composition of claim 68, the vector of claim 69, or the cell of claim 70 for use in prevention or treatment of a nucleotide repeat expansion disorder.

85. The dsRNA, the pharmaceutical composition, the composition, the vector, or the cell of claim 84, wherein the nucleotide repeat expansion disorder is selected from the group consisting of dentatorubropallidoluysian atrophy, Huntington's disease, spinal and bulbar muscular atrophy, spinocerebellar ataxia type 1, spinocerebellar ataxia type 2, spinocerebellar ataxia type 3, spinocerebellar ataxia type 6, spinocerebellar ataxia type 7, spinocerebellar ataxia type 17, Huntington's disease-like 2, fragile X syndrome, fragile X-associated tremor/ataxia syndrome, fragile XE mental retardation, Friedreich's ataxia, myotonic dystrophy type 1, spinocerebellar ataxia type 8, spinocerebellar ataxia type 12, oculopharyngeal muscular dystrophy, Fragile X-associated premature ovarian failure, FRA2A syndrome, FRA7A syndrome, and early infantile epileptic encephalopathy.

86. The dsRNA, the pharmaceutical composition, the composition, the vector, or the cell of claim 84 or 85, wherein the nucleotide repeat expansion disorder is Huntington's disease.

87. The dsRNA, the pharmaceutical composition, the composition, the vector, or the cell of claim 84 or 85, wherein the nucleotide repeat expansion disorder is Friedreich's ataxia.

88. The dsRNA, the pharmaceutical composition, the composition, the vector, or the cell of claim 84 or 85, wherein the nucleotide repeat expansion disorder is myotonic dystrophy type 1.

89. The dsRNA, the pharmaceutical composition, the composition, the vector, or the cell of any of claims 84-88, wherein the dsRNA, pharmaceutical composition, composition, vector, or cell is administered intrathecally.

90. The dsRNA, the pharmaceutical composition, the composition, the vector, or the cell of any of claims 84-88, wherein the dsRNA, pharmaceutical composition, composition, vector, or cell is administered intraventricularly.

91. The dsRNA, the pharmaceutical composition, the composition, the vector, or the cell of any of claims 84-88, wherein the dsRNA, pharmaceutical composition, composition, vector, or cell is administered intramuscularly.

92. A method of treating, preventing, or delaying progression of a disorder in a subject in need thereof wherein the subject is suffering from nucleotide repeat expansion disorder, comprising administering to said subject the dsRNA of any one of claims 1-66, the pharmaceutical composition of claim 67, the composition of claim 68, the vector of claim 69, or the cell of claim 70.

93. The method of claim 92, further comprising administering at least one additional therapeutic agent.

94. The method of claim 93, wherein at least one additional therapeutic agent is an antisense oligonucleotide that hybridizes to an mRNA encoding the Huntingtin gene.

95. A method of preventing or delaying progression of a nucleotide repeat expansion disorder in a subject, the method comprising administering to the subject the dsRNA of any one of claims 1-66, the pharmaceutical composition of claim 67, the composition of claim 68, the vector of claim 69, or the cell of claim 70 in an amount effective to delay progression of a nucleotide repeat expansion disorder of the subject.

96. The method of claim 95, wherein the nucleotide repeat expansion disorder is selected from the group consisting of dentatorubropallidoluysian atrophy, Huntington's disease, spinal and bulbar muscular atrophy, spinocerebellar ataxia type 1, spinocerebellar ataxia type 2, spinocerebellar ataxia type 3, spinocerebellar ataxia type 6, spinocerebellar ataxia type 7, spinocerebellar ataxia type 17, Huntington's disease-like 2, fragile X syndrome, fragile X-associated tremor/ataxia syndrome, fragile XE mental retardation, Friedreich's ataxia, myotonic dystrophy type 1, spinocerebellar ataxia type 8, spinocerebellar ataxia type 12, oculopharyngeal muscular dystrophy, Fragile X-associated premature ovarian failure, FRA2A syndrome, FRA7A syndrome, and early infantile epileptic encephalopathy.

97. The method of claim 95 or 96, wherein the nucleotide repeat expansion disorder is Huntington's disease.

98. The method of claim 95 or 96, wherein the nucleotide repeat expansion disorder is Friedrich's ataxia.

99. The method of claim 95 or 96, wherein the nucleotide repeat expansion disorder is myotonic dystrophy type 1.

100. The method of any of claim 95 or 96, further comprising administering at least one additional therapeutic agent.

101. The method of claim 100, wherein at least one additional therapeutic agent is an antisense oligonucleotide that hybridizes to an mRNA encoding the Huntingtin gene.

102. The method of any of claims 95-101, wherein progression of the nucleotide repeat expansion disorder is delayed by at least 120 days, for example, at least 6 months, at least 12 months, at least 2 years, at least 3 years, at least 4 years, at least 5 years, at least 10 years or more, when compared with a predicted progression.

103. A dsRNA of any one of claims 1-66, the pharmaceutical composition of claim 67, the composition of claim 68, the vector of claim 69, or the cell of claim 70, for use in preventing or delaying progression of a nucleotide repeat expansion disorder in a subject.

104. The dsRNA, the pharmaceutical composition, the composition, the vector, or the cell for use of claim 103, wherein the nucleotide repeat expansion disorder is selected from the group consisting of dentatorubropallidoluysian atrophy, Huntington's disease, spinal and bulbar muscular atrophy, spinocerebellar ataxia type 1, spinocerebellar ataxia type 2, spinocerebellar ataxia type 3, spinocerebellar ataxia type 6, spinocerebellar ataxia type 7, spinocerebellar ataxia type 17, Huntington's disease-like 2, fragile X syndrome, fragile X-associated tremor/ataxia syndrome, fragile XE mental retardation, Friedreich's ataxia, myotonic dystrophy type 1, spinocerebellar ataxia type 8, spinocerebellar ataxia type 12, oculopharyngeal muscular dystrophy, Fragile X-associated premature ovarian failure, FRA2A syndrome, FRA7A syndrome, and early infantile epileptic encephalopathy.

105. The dsRNA, the pharmaceutical composition, the composition, the vector, or the cell of claim 103 or 104, wherein the nucleotide repeat expansion disorder is Huntington's disease.

106. The dsRNA, the pharmaceutical composition, the composition, the vector, or the cell of claim 103 or 104, wherein the nucleotide repeat expansion disorder is Friedrich's ataxia.

107. The dsRNA, the pharmaceutical composition, the composition, the vector, or the cell of claim 103 or 104, wherein the nucleotide repeat expansion disorder is myotonic dystrophy type 1.

108. The dsRNA, the pharmaceutical composition, the composition, the vector, or the cell of any one of claims 103-107, wherein progression of the nucleotide repeat expansion disorder is delayed by at least 120 days, for example, at least 6 months, at least 12 months, at least 2 years, at least 3 years, at least 4 years, at least 5 years, at least 10 years or more, when compared with a predicted progression.

109. The dsRNA, the pharmaceutical composition, the composition, the vector, or the cell of any one of claims 103-107, wherein progression of the nucleotide repeat expansion disorder is delayed by at least 120 days, for example, at least 6 months, at least 12 months, at least 2 years, at least 3 years, at least 4 years, at least 5 years, at least 10 years, or at least 20 years or more, when compared with a predicted progression.

110. The dsRNA of any one of claims 1-4, wherein the region the sense or antisense strand is complementary to is at least 15 contiguous nucleotides of an MSH3 gene corresponding to a sequence of reference mRNA NM_002439.4 at one or more of positions 430-453, 508-531, 560-599, 609-632, 681-721, 768-797, 823-856, 882-927, 968-1029, 1039-1096, 1106-1175, 1188-1217, 1272-1297, 1419-1474, 1489-1516, 1540-1627, 1633-1815, 1819-1842, 1899-1937, 2027-2066, 2085-2108, 2117-2156, 2163-2187, 2195-2241, 2293-2343, 2347-2374, 2493-2539, 2567-2590, 2619-2649, 2737-2764, 2779-2820, 2871-2894, 2900-2923, 2949-2972, 3049-3096, 3217-3266, 3272-3309, 3351-3383, 3386-3415, 3537-3560, 3581-3619, 3686-3728, 3754-3778, 3782-3805, 3909-3935, 4287-4310, or 4386-4412 of the MSH3 gene.

111. The dsRNA of any one of claims 1-4, wherein the region the sense or antisense strand is complementary to is at least 15 contiguous nucleotides of an MSH3 gene corresponding to a sequence of reference mRNA NM_002439.4 at one or more of positions 508-531, 827-856, 903-926, 1073-1096, 1126-1149, 1583-1609, 1639-1662, 1727-1750, 1755-1795, 1819-1842, 1905-1937, 2130-2153, 2293-2316, 2505-2528, 2625-2648, 2797-2820, 3073-3096, 3217-3240, 3351-3383, 3686-3728, 3754-3777, 4287-4310, or 4386-4412 of the MSH3 gene.

112. The dsRNA of any one of claims 1-4, wherein the region the sense or antisense strand is complementary to is at least 15 contiguous nucleotides of an MSH3 gene corresponding to a sequence of reference mRNA NM_002439.4 at one or more of positions 508-531, 833-856, 1073-1096, 1126-1149, 1583-1609, 1639-1662, 1727-1750, 1755-1795, 1914-1937, 2130-2153, 2293-2316, 2797-2820, 3073-3096, 3217-3240, 3596-3619, 3700-3723, 3754-3777, or 4386-4409 of the MSH3 gene.

113. The dsRNA of any one of claims 1-4, wherein the region the sense or antisense strand is complementary to is at least 15 contiguous nucleotides of an MSH3 gene corresponding to a sequence of reference mRNA NM_002439.4 at one or more of positions 1073-1096, 1586-1609, 1755-1795, 1914-1937, 2130-2153, 2293-2316, 3217-3240, or 4386-4409 of the MSH3 gene

114. The dsRNA of any one of claims 1-4, wherein the region the sense or antisense strand is complementary to is at least 15 contiguous nucleotides of an MSH3 gene corresponding to a sequence of reference mRNA NM_002439.4 at positions 908-925 of the MSH3 gene.

115. The dsRNA of any one of claims 1-4, wherein the region the sense or antisense strand is complementary to is at least 15 contiguous nucleotides of an MSH3 gene corresponding to a sequence of reference mRNA NM_002439.4 at positions 1167-1184 of the MSH3 gene.

116. The dsRNA of any one of claims 1-4, wherein the region the sense or antisense strand is complementary to is at least 15 contiguous nucleotides of an MSH3 gene corresponding to a sequence of reference mRNA NM_002439.4 at positions 1143-1166 of the MSH3 gene.

117. The dsRNA of any one of claims 1-4, wherein the region the sense or antisense strand is complementary to is at least 15 contiguous nucleotides of an MSH3 gene corresponding to a sequence of reference mRNA NM_002439.4 at positions 1150-1173 of the MSH3 gene

118. The dsRNA of any one of claims 1-4, wherein the region the sense or antisense strand is complementary to is at least 15 contiguous nucleotides of an MSH3 gene corresponding to a sequence of reference mRNA NM_002439.4 at positions 2090-2107 of the MSH3 gene

119. The dsRNA of any one of claims 1-4, wherein the region the sense or antisense strand is complementary to is at least 15 contiguous nucleotides of an MSH3 gene corresponding to a sequence of reference mRNA NM_002439.4 at positions 1040-1057 of the MSH3 gene

120. The dsRNA of any one of claims 1-4, wherein the region the sense or antisense strand is complementary to is at least 15 contiguous nucleotides of an MSH3 gene corresponding to a sequence of reference mRNA NM_002439.4 at positions 2018-2035 of the MSH3 gene

121. The dsRNA of any one of claims 1-4, wherein the region the sense or antisense strand is complementary to is at least 15 contiguous nucleotides of an MSH3 gene corresponding to a sequence of reference mRNA NM_002439.4 at positions 1469-1486 of the MSH3 gene

122. The dsRNA of any one of claims 1-4, wherein the region the sense or antisense strand is complementary to is at least 15 contiguous nucleotides of an MSH3 gene corresponding to a sequence of reference mRNA NM_002439.4 at positions 1128-1151 of the MSH3 gene.

123. The dsRNA of any one of claims 1-4, wherein the region the sense or antisense strand is complementary to is at least 15 contiguous nucleotides of an MSH3 gene corresponding to a sequence of reference mRNA NM_002439.4 at positions 828-851 of the MSH3 gene.

124. The dsRNA of any one of claims 1-4, wherein the antisense strand comprises an antisense nucleobase sequence selected from Table 12, wherein the 5′ nucleotide represented by U can be any nucleotide (e.g., U, A, C, G), and the sense strand comprises a sense nucleobase sequence complementary to the antisense nucleobase sequence.

125. The dsRNA of any one of claims 1-4, wherein the antisense nucleobase sequence consists of an antisense strand in Table 12, wherein the 5′ nucleotide represented by U can be any nucleotide (e.g., U, A, C, G), and the sense nucleobase sequence consists of a sequence complementary to the antisense nucleobase sequence.

126. The dsRNA of any one of claims 1-4, wherein the sense strand comprises a sense nucleobase sequence selected from Table 12, and the antisense strand comprises an antisense nucleobase sequence complementary to the sense nucleobase sequence.

127. The dsRNA of any one of claims 1-4, wherein the sense nucleobase sequence consists of a sense strand in Table 12, and the antisense nucleobase sequence consists of a sequence complementary to the sense nucleobase sequence.

128. The dsRNA of any one of claims 109-127, wherein the dsRNA comprises at least one alternative nucleobase, at least one alternative internucleoside linkage, at least one alternative sugar moiety, or a combination thereof, optionally wherein the sense strand is selected from Table 13 and the antisense strand is selected from Table 14.

129. The dsRNA of claim 127, wherein at least one alternative internucleoside linkage is a phosphorothioate internucleoside linkage.

130. The dsRNA of claim 127, wherein at least one alternative internucleoside linkage is a 2′-alkoxy internucleoside linkage.

131. The dsRNA of claim 127, wherein at least one alternative internucleoside linkage is an alkyl phosphate internucleoside linkage.

132. The dsRNA of claim 127, wherein at least one alternative nucleobase is 5′-methylcytosine, pseudouridine, or 5-methoxyuridine.

133. The dsRNA of claim 127, wherein at least one alternative sugar moiety is 2′-OMe or a bicyclic nucleic acid.

134. The dsRNA of claim 127, wherein the dsRNA comprises at least one 2′-OMe sugar moiety and at least one phosphorothioate internucleoside linkage.

135. The dsRNA of any one of claims 110-134, wherein the dsRNA further comprises a ligand conjugated to the 3′ end of the sense strand through a monovalent or branched bivalent or trivalent linker.

136. The dsRNA of any one of claims 110-135, wherein the sense strand comprises a nucleobase sequence of any one of SEQ ID NOs: 78, 82, 104, 148, 158, 160, 190, 240, 244, 246, 250, 252, 260, 308, 314, 316, 354,356, 360, 362, 364, 368, 370, 372, 396, 414, 416, 418, 474, 476, 478, 480, 502, 512, 552 558, 560, 582, 616, 618, 634, 636, 642, 646, 648, 656, 660, 690, 692, 718, 720, 722, 796, 820, 822, 826, 848, 852, 854, 900, 914, 928, 930, 934, 936, 946, 948, 966, 970,972, 988, 990, 992, 994, 996, 1006, 1020, 1032, 1054, 1056, 1058, 1076, 1088, 1096, 1098, 1110, 1112, 1126, 1214, 1220, 1230, 1306, 1308, 1310, 1318, 1326, 1386, 1394, 1396, 1400, 1404, 1424, 1426, 1448, 1452, 1454, 1506, 1524, 1540, 1546, 1656, 1666, 1674, 1676, 1678, 1722, 1762, 1766, 1768, 1836, 1838, 1842, 1868, 1886, 1888, 1964, 1990, 2030, 2108, 2128, 2230, 2242, 2246, 2254, 2274, 2294, 2330, 2334, 2356, 2360, 2362, 2448, 2502, 2504, 2516, 2518, 2578, 2580, 2592, 2596, 2602, 2654, 2656, 2686, 2762, 2768, 2782, 2844, or 2846.

137. The dsRNA of any one of claims 110-135, wherein the sense strand comprises a nucleobase sequence of any one of SEQ ID NOs: 362, 370, 372, 416, 582, 634, 930, 934, 970, 1054, 1076, 1088, 1096, 1098, 1126, 1220, 1230, 1400, 1506, 1666, 1766, 1888, 2128, 2230, 2330, 2334, 2448, 2504, 2516, 2518, 2578, 2592, 2596, 2602, 2654, 2782, 2844, or 2846.

138. The dsRNA of any one of claims 110-135, wherein the sense strand comprises a nucleobase sequence of any one of SEQ ID NOs: 104, 372, 582, 634, 930, 934, 970, 1054, 1076, 1088, 1098, 1230, 1400, 1506, 1888, 2128, 2230, 2518, 2592, 2654, or 2844.

139. The dsRNA of any one of claims 110-135, wherein the sense strand comprises a nucleobase sequence of any one of SEQ ID NOs: 582, 934, 1076, 1088, 1098, 1230, 1400, 1506, 2230, or 2844.

140. The dsRNA of any one of claims 110-135, wherein the sense strand consists of a nucleobase sequence of any one of SEQ ID NOs: 78, 82, 104, 148, 158, 160, 190, 240, 244, 246, 250, 252, 260, 308, 314, 316, 354, 356, 360, 362, 364, 368, 370, 372, 396, 414, 416, 418, 474, 476, 478, 480, 502, 512, 552, 558, 560, 582, 616, 618, 634, 636, 642, 646, 648, 656, 660, 690, 692, 718, 720, 722, 796, 820, 822, 826, 848, 852, 854, 900, 914, 928, 930, 934, 936, 946, 948, 966, 970, 972, 988, 990, 992, 994, 996, 1006, 1020, 1032, 1054, 1056, 1058, 1076, 1088, 1096, 1098, 1110, 1112, 1126, 1214, 1220, 1230, 1306, 1308, 1310, 1318, 1326, 1386, 1394, 1396, 1400, 1404, 1424, 1426, 1448, 1452, 1454, 1506, 1524, 1540, 1546, 1656, 1666, 1674, 1676, 1678, 1722, 1762, 1766, 1768, 1836, 1838, 1842, 1868, 1886, 1888, 1964, 1990, 2030, 2108, 2128, 2230, 2242, 2246, 2254, 2274, 2294, 2330, 2334, 2356, 2360, 2362, 2448, 2502, 2504, 2516, 2518, 2578, 2580, 2592, 2596, 2602, 2654, 2656, 2686, 2762, 2768, 2782, 2844, or 2846.

141. The dsRNA of any one of claims 110-135, wherein the sense strand consists of a nucleobase sequence of any one of SEQ ID NOs: 104, 362, 370, 372, 416, 582, 634, 930, 934, 970, 1054, 1076, 1088, 1096, 1098, 1126, 1220, 1230, 1400, 1506, 1666, 1766, 1888, 2128, 2230, 2330, 2334, 2448, 2504, 2516 2518, 2578, 2592, 2596, 2602, 2654, 2782, 2844, or 2846.

142. The dsRNA of any one of claims 110-135, wherein the sense strand consists of a nucleobase sequence of any one of SEQ ID NOs: 104, 372, 582, 634, 930, 934, 970, 1054, 1076, 1088, 1098, 1230, 1400, 1506, 1888, 2128, 2230, 2518, 2592, 2654, or 2844.

143. The dsRNA of any one of claims 110-135, wherein the sense strand consists of a nucleobase sequence of any one of SEQ ID NOs: 582, 934, 1076, 1088, 1098, 1230, 1400, 1506, 2230, or 2844

144. The dsRNA of any one of claims 110-135, wherein the sense strand consists of a nucleobase sequence of any one of SEQ ID NOs: 78, 82, 104, 148, 158, 160, 190, 240, 244, 246, 250, 252, 260, 308, 314, 316, 354, 356, 360, 362, 364, 368, 370, 372, 396, 414, 416, 418, 474, 476,478, 480, 502, 512, 552 558, 560, 582, 616, 618, 634, 636, 642, 646, 648, 656, 660, 690, 692, 718, 720, 722, 796, 820, 822, 826, 848, 852, 854, 900, 914, 928, 930, 934,936, 946, 948, 966, 970,972, 988, 990, 992, 994, 996, 1006, 1020, 1032, 1054, 1056, 1058, 1076, 1088, 1096, 1098, 1110, 1112, 1126, 1214, 1220, 1230, 1306, 1308, 1310, 1318, 1326, 1386, 1394, 1396, 1400, 1404, 1424, 1426, 1448, 1452, 1454, 1506, 1524, 1540, 1546, 1656, 1666, 1674, 1676, 1678, 1722, 1762, 1766, 1768, 1836, 1838, 1842, 1868, 1886, 1888, 1964, 1990, 2030, 2108, 2128, 2230, 2242, 2246, 2254, 2274, 2294, 2330, 2334, 2356, 2360, 2362, 2448, 2502, 2504, 2516, 2518, 2578, 2580, 2592, 2596, 2602, 2654, 2656, 2686, 2762, 2768, 2782, 2844, or 2846 and an overhang of 1-4 nucleotides.

145. The dsRNA of any one of claims 110-135, wherein the sense strand consists of a nucleobase sequence of any one of SEQ ID NOs: 104, 362, 370, 372, 416, 582, 634, 930, 934, 970, 1054, 1076, 1088, 1096, 1098, 1126, 1220, 1230, 1400, 1506, 1666, 1766, 1888, 2128, 2230, 2330, 2334, 2448, 2504, 2516, 2518, 2578, 2592, 2596, 2602, 2654, 2782, 2844, or 2846 and an overhang of 1-4 nucleotides.

146. The dsRNA of any one of claims 110-135, wherein the sense strand consists of a nucleobase sequence of any one of SEQ ID NOs: 104, 372, 582, 634,930, 934, 970, 1054, 1076, 1088, 1098, 1230, 1400, 1506, 1888, 2128, 2230, 2518, 2592, 2654, or 2844 and an overhang of 1-4 nucleotides.

147. The dsRNA of any one of claims 110-135, wherein the sense strand consists of a nucleobase sequence of any one of SEQ ID NOs: 582, 934, 1076, 1088, 1098, 1230, 1400, 1506, 2230, or 2844 and an overhang of 1-4 nucleotides.

148. The dsRNA of any one of claims 110-135, wherein the antisense strand comprises a nucleobase sequence of any one of SEQ ID NOs: 79, 83, 105, 149, 159, 161, 191, 241, 245, 247, 251, 253, 261, 309, 315, 317, 355, 357, 361, 363, 365, 369, 371, 373, 379, 415, 417, 419, 475, 477, 479, 481, 503, 513, 553, 559, 561, 583, 617, 619, 635, 637, 643, 647, 649, 657, 661, 691, 693, 719, 721, 723, 797, 821, 823, 827, 849, 853, 855, 901, 915, 929, 931, 935, 937, 947, 949, 967, 971, 973, 989, 991, 993, 995, 997, 1007, 1021, 1032, 1055, 1057, 1059, 1077, 1089, 1097, 1099, 1111, 1113, 1127, 1215, 1221, 1230, 1307, 1309, 1311, 1319, 1363, 1387, 1395, 1397, 1401, 1405, 1425, 1427, 1449, 1453, 1455, 1507, 1525, 1541, 1547, 1657, 1667, 1675, 1677, 1679, 1723, 1763, 1767, 1769, 1837, 1839, 1843, 1869, 1887, 1889, 1965, 1991, 2031, 2109, 2129, 2231, 2243, 2247, 2255, 2275, 2295, 2331, 2335, 2357, 2361, 2363, 2449, 2503, 2505, 2517, 2519, 2579, 2581, 2593, 2597, 2603, 2655, 2657, 2687, 2763, 2769, 2783, 2845, or 2847, wherein the 5′ nucleotide represented by U can be any nucleotide (e.g., U, A, C, G).

149. The dsRNA of any one of claims 110-135, wherein the antisense strand comprises a nucleobase sequence of any one of SEQ ID NOs: 104, 362, 370, 372, 416, 582, 634, 930, 934, 970, 1054, 1076, 1088, 1096, 1098, 1126, 1220, 1230, 1400, 1506, 1666, 1766, 1888, 2128, 2230, 2330, 2334, 2448, 2504, 2516, 2518, 2578, 2592, 2596, 2602, 2654, 278, 2844, or 2846, wherein the 5′ nucleotide represented by U can be any nucleotide (e.g., U, A, C, G).

150. The dsRNA of any one of claims 110-135, wherein the antisense strand comprises a nucleobase sequence of any one of SEQ ID NOs: 104, 372, 582, 634, 930, 934, 970, 1054, 1076, 1088, 1098, 1230, 1400, 1506, 1888, 2128, 2230, 2518, 2592, 2654, or 2844, wherein the 5′ nucleotide represented by U can be any nucleotide (e.g., U, A, C, G).

151. The dsRNA of any one of claims 110-135, wherein the antisense strand comprises a nucleobase sequence of any one of SEQ ID NOs: 582, 934, 1076, 1088, 1098, 1230, 1400, 1506, 2230, or 2844, wherein the 5′ nucleotide represented by U can be any nucleotide (e.g., U, A, C, G)

152. The dsRNA of any one of claims 110-135, wherein the antisense strand consists of a nucleobase sequence of any one of SEQ ID NOs: 79, 83, 105, 149, 159, 161, 191, 241, 245, 247, 251, 253, 261, 309, 315, 317, 355, 357, 361, 363, 365, 369, 371, 373, 379, 415, 417, 419, 475, 477, 479, 481, 503, 513, 553, 559, 561, 583, 617, 619, 635, 637, 643, 647, 649, 657, 661, 691, 693, 719, 721, 723, 797, 821, 823, 827, 849, 853, 855, 901, 915, 929, 931, 935, 937, 947, 949, 967, 971, 973, 989, 991, 993, 995, 997, 1007, 1021, 1032, 1055, 1057, 1059, 1077, 1089, 1097, 1099, 1111, 1113, 1127, 1215, 1221, 1230, 1307, 1309, 1311, 1319, 1363, 1387, 1395, 1397, 1401, 1405, 1425, 1427, 1449, 1453, 1455, 1507, 1525, 1541, 1547, 1657, 1667, 1675, 1677, 1679, 1723, 1763, 1767, 1769, 1837, 1839, 1843, 1869, 1887, 1889, 1965, 1991, 2031, 2109, 2129, 2231, 2243, 2247, 2255, 2275, 2295, 2331, 2335, 2357, 2361, 2363, 2449, 2503, 2505, 2517, 2519, 2579, 2581, 2593, 2597, 2603, 2655, 2657, 2687, 2763, 2769, 2783, 2845, or 2847, wherein the 5′ nucleotide represented by U can be any nucleotide (e.g., U, A, C, G).

153. The dsRNA of any one of claims 110-135, wherein the antisense strand consists of a nucleobase sequence of any one of SEQ ID NOs: 104, 362, 370, 372, 416, 582, 634, 930, 934, 970, 1054, 1076, 1088, 1096, 1098, 1126, 1220, 1230, 1400, 1506 1666, 1766, 1888, 2128, 2230, 2330, 2334, 2448, 2504, 2516, 2518, 2578, 2592, 2596, 2602, 2654, 2782, 2844, or 2846, wherein the 5′ nucleotide represented by U can be any nucleotide (e.g., U, A, C, G).

154. The dsRNA of any one of claims 110-135, wherein the antisense strand consists of a nucleobase sequence of any one of SEQ ID NOs: 104, 372, 582, 634, 930, 934, 970, 1054, 1076, 1088, 1098, 1230, 1400, 1506, 1888, 2128, 2230, 2518, 2592, 2654, or 2844, wherein the 5′ nucleotide represented by U can be any nucleotide (e.g., U, A, C, G).

155. The dsRNA of any one of claims 110-135, wherein the antisense strand consists of a 1400, 1506, 2230, or 2844, wherein the 5′ nucleotide represented by U can be any nucleotide (e.g., U, A, C, G)

156. The dsRNA of any one of claims 110-135, wherein the antisense strand consists of a nucleobase sequence of any one of SEQ ID NOs: 79, 83, 105, 149, 159, 161, 191, 241, 245, 247, 251, 253, 261, 309, 315, 317, 355, 357, 361, 363, 365, 369, 371, 373, 379, 415, 417, 419, 475, 477, 479, 481, 503, 513, 553, 559, 561, 583, 617, 619, 635, 637, 643, 647, 649, 657, 661, 691, 693, 719, 721, 723, 797, 821, 823, 827, 849, 853, 855, 901, 915, 929, 931, 935, 937, 947, 949, 967, 971, 973, 989, 991, 993, 995, 997, 1007, 1021, 1032, 1055, 1057, 1059, 1077, 1089, 1097, 1099, 1111, 1113, 1127, 1215, 1221, 1230, 1307, 1309, 1311, 1319, 1363, 1387, 1395, 1397, 1401, 1405, 1425, 1427, 1449, 1453, 1455, 1507, 1525, 1541, 1547, 1657, 1667, 1675, 1677, 1679, 1723, 1763, 1767, 1769, 1837, 1839, 1843, 1869, 1887, 1889, 1965, 1991, 2031, 2109, 2129, 2231, 2243, 2247, 2255, 2275, 2295, 2331, 2335, 2357, 2361, 2363, 2449, 2503, 2505, 2517, 2519, 2579, 2581, 2593, 2597, 2603, 2655, 2657, 2687, 2763, 2769, 2783, 2845, or 2847, wherein the 5′ nucleotide represented by U can be any nucleotide (e.g., U, A, C, G), and an overhang of 1-4 nucleotides.

157. The dsRNA of any one of claims 110-135, wherein the antisense strand consists of a nucleobase sequence of any one of SEQ ID NOs: 104, 362, 370, 372, 416, 582, 634, 930, 934, 970, 1054, 1076, 1088, 1096, 1098, 1126, 1220, 1230, 1400, 1506 1666, 1766, 1888, 2128, 2230, 2330, 2334, 2448, 2504, 2516, 2518, 2578, 2592, 2596, 2602, 2654, 2782, 2844, or 2846, wherein the 5′ nucleotide represented by U can be any nucleotide (e.g., U, A, C, G), and an overhang of 1-4 nucleotides.

158. The dsRNA of any one of claims 110-135, wherein the antisense strand consists of a nucleobase sequence of any one of SEQ ID NOs: 104, 372, 582, 634, 930, 934, 970, 1054, 1076, 1088, 1098, 1230, 1400, 1506, 1888, 2128, 2230, 2518, 2592, 2654, or 2844, wherein the 5′ nucleotide represented by U can be any nucleotide (e.g., U, A, C, G), and an overhang of 1-4 nucleotides.

159. The dsRNA of any one of claims 110-135, wherein the antisense strand consists of a 1400, 1506, 2230, or 2844, wherein the 5′ nucleotide represented by U can be any nucleotide (e.g., U, A, C, G), and an overhang of 1-4 nucleotides.

160. The dsRNA of claim 136, wherein the sense strand comprises a nucleobase sequence of SEQ ID NO: 656.

161. The dsRNA of claim 136, wherein the sense strand comprises a nucleobase sequence of SEQ ID NO: 636.

162. The dsRNA of claim 136, wherein the sense strand comprises a nucleobase sequence of SEQ ID NO: 364.

163. The dsRNA of claim 136, wherein the sense strand comprises a nucleobase sequence of SEQ ID NO: 648.

164. The dsRNA of claim 136, wherein the sense strand comprises a nucleobase sequence of SEQ ID NO: 1366.

165. The dsRNA of claim 136, wherein the sense strand comprises a nucleobase sequence of SEQ ID NO: 550.

166. The dsRNA of claim 136, wherein the sense strand comprises a nucleobase sequence of SEQ ID NO: 1874.

167. The dsRNA of claim 136, wherein the sense strand comprises a nucleobase sequence of SEQ ID NO: 1302.

168. The dsRNA of claim 136, wherein the sense strand comprises a nucleobase sequence of SEQ ID NO: 420.

169. The dsRNA of claim 136, wherein the sense strand comprises a nucleobase sequence of SEQ ID NO: 672.

170. The dsRNA of claim 136, wherein the sense strand comprises a nucleobase sequence of SEQ ID NO: 832.

171. The dsRNA of claim 148, wherein the antisense strand comprises a nucleobase sequence of SEQ ID NO: 649, wherein the 5′ nucleotide represented by U can be any nucleotide (e.g., U, A, C, G).

172. The dsRNA of claim 148, wherein the antisense strand comprises a nucleobase sequence of SEQ ID NO: 657, wherein the 5′ nucleotide represented by U can be any nucleotide (e.g., U, A, C, G).

173. The dsRNA of claim 148, wherein the antisense strand comprises a nucleobase sequence of SEQ ID NO: 637, wherein the 5′ nucleotide represented by U can be any nucleotide (e.g., U, A, C, G).

174. The dsRNA of claim 148, wherein the antisense strand comprises a nucleobase sequence of SEQ ID NO: 365, wherein the 5′ nucleotide represented by U can be any nucleotide (e.g., U, A, C, G).

175. The dsRNA of claim 148, wherein the antisense strand comprises a nucleobase sequence of SEQ ID NO: 1367, wherein the 5′ nucleotide represented by U can be any nucleotide (e.g., U, A, C, G).

176. The dsRNA of claim 148, wherein the antisense strand comprises a nucleobase sequence of SEQ ID NO: 551, wherein the 5′ nucleotide represented by U can be any nucleotide (e.g., U, A, C, G).

177. The dsRNA of claim 148, wherein the antisense strand comprises a nucleobase sequence of SEQ ID NO: 1875, wherein the 5′ nucleotide represented by U can be any nucleotide (e.g., U, A, C, G).

178. The dsRNA of claim 148, wherein the antisense strand comprises a nucleobase sequence of SEQ ID NO: 1303, wherein the 5′ nucleotide represented by U can be any nucleotide (e.g., U, A, C, G).

179. The dsRNA of claim 148, wherein the antisense strand comprises a nucleobase sequence of SEQ ID NO: 421, wherein the 5′ nucleotide represented by U can be any nucleotide (e.g., U, A, C, G).

180. The dsRNA of claim 148, wherein the antisense strand comprises a nucleobase sequence of SEQ ID NO: 673, wherein the 5′ nucleotide represented by U can be any nucleotide (e.g., U, A, C, G).

181. The dsRNA of claim 148, wherein the antisense strand comprises a nucleobase sequence of SEQ ID NO: 833, wherein the 5′ nucleotide represented by U can be any nucleotide (e.g., U, A, C, G).

182. The dsRNA of any one of claims 110-135, wherein the sense strand is any one of Sense Oligo Nos: 78, 82, 104, 148, 158, 160, 190, 240, 244, 246, 250, 252, 260, 308, 314, 316, 354, 356, 360, 362, 364, 368, 370, 372, 396, 414, 416, 418, 474, 476, 478, 480, 502, 512, 552 558, 560, 582, 616, 618, 634, 636, 642, 646, 648, 656, 660, 690, 692, 718, 720, 722, 796, 820, 822, 826, 848, 852, 854, 900, 914, 928, 930, 934, 936, 946, 948, 966, 970, 972, 988, 990, 992, 994, 996, 1006, 1020, 1032, 1054, 1056, 1058, 1076, 1088, 1096, 1098, 1110, 1112, 1126, 1214, 1220, 1230, 1306, 1308, 1310, 1318, 1326, 1386, 1394, 1396, 1400, 1404, 1424, 1426, 1448, 1452, 1454, 1506, 1524, 1540, 1546, 1656, 1666, 1674, 1676, 1678, 1722, 1762, 1766, 1768, 1836, 1838, 1842, 1868, 1886, 1888, 1964, 1990, 2030, 2108, 2128, 2230, 2242, 2246, 2254, 2274, 2294, 2330, 2334, 2356, 2360, 2362, 2448, 2502, 2504, 2516, 2518, 2578, 2580, 2592, 2596, 2602, 2654, 2656, 2686, 2762, 2768, 2782, 2844, or 2846.

183. The dsRNA of any one of claims 110-135, wherein the sense strand is any one of Sense Oligo Nos: 362, 370, 372, 416, 582, 634, 930, 934, 970, 1054, 1076, 1088, 1096, 1098, 1126, 1220, 1230, 1400, 1506, 1666, 1766, 1888, 2128, 2230, 2330, 2334, 2448, 2504, 2516 2518, 2578, 2592, 2596, 2602, 2654, 2782, 2844, or 2846.

184. The dsRNA of any one of claims 110-135, wherein the sense strand is any one of Sense Oligo Nos: 104, 372, 582, 634, 930, 934, 970, 1054, 1076, 1088, 1098, 1230, 1400, 1506, 1888, 2128, 2230, 2518, 2592, 2654, or 2844.

185. The dsRNA of any one of claims 110-135, wherein the sense strand is any one of Sense Oligo Nos: 582, 934, 1076, 1088, 1098, 1230, 1400, 1506, 2230, or 2844.

186. The dsRNA of any one of claims 110-135, wherein the antisense strand is any one of Antisense Oligo Nos: 79, 83, 105, 149, 159, 161, 191, 241, 245, 247, 251, 253, 261, 309, 315, 317, 355, 357, 361, 363, 365, 369, 371, 373, 379, 415, 417, 419, 475, 477, 479, 481, 503, 513, 553, 559, 561, 583, 617, 619, 635, 637, 643, 647, 649, 657, 661, 691, 693, 719, 721, 723, 797, 821, 823, 827, 849, 853, 855, 901, 915, 929, 931, 935, 937, 947, 949, 967, 971, 973, 989, 991, 993, 995, 997, 1007, 1021, 1032, 1055, 1057, 1059, 1077, 1089, 1097, 1099, 1111, 1113, 1127, 1215, 1221, 1230, 1307, 1309, 1311, 1319, 1363, 1387, 1395, 1397, 1401, 1405, 1425, 1427, 1449, 1453, 1455, 1507, 1525, 1541, 1547, 1657, 1667, 1675, 1677, 1679, 1723, 1763, 1767, 1769, 1837, 1839, 1843, 1869, 1887, 1889, 1965, 1991, 2031, 2109, 2129, 2231, 2243, 2247, 2255, 2275, 2295, 2331, 2335, 2357, 2361, 2363, 2449, 2503, 2505, 2517, 2519, 2579, 2581, 2593, 2597, 2603, 2655, 2657, 2687, 2763, 2769, 2783, 2845, or 2847, wherein the 5′ nucleotide represented by U can be any nucleotide (e.g., U, A, C, G).

187. The dsRNA of any one of claims 110-135, wherein the antisense strand is any one of Antisense Oligo Nos: 104, 362, 370, 372, 416, 582, 634, 930, 934, 970, 1054, 1076, 1088, 1096, 1098, 1126, 1220, 1230, 1400, 1506, 1666, 1766, 1888, 2128, 2230, 2330, 2334, 2448, 2504, 2516, 2518, 2578, 2592, 2596, 2602, 2654, 2782, 2844, or 2846, wherein the 5′ nucleotide represented by U can be any nucleotide (e.g., U, A, C, G).

188. The dsRNA of any one of claims 110-135, wherein the antisense strand is any one of Antisense Oligo Nos: 104, 372, 582, 634, 930, 934, 970, 1054, 1076, 1088, 1098, 1230, 1400, 1506, 1888, 2128, 2230, 2518, 2592, 2654, or 2844, wherein the 5′ nucleotide represented by U can be any nucleotide (e.g., U, A, C, G).

189. The dsRNA of any one of claims 110-135, wherein the antisense strand is any one of Antisense Oligo Nos: 582, 934, 1076, 1088, 1098, 1230, 1400, 1506, 2230, or 2844, wherein the 5′ nucleotide represented by U can be any nucleotide (e.g., U, A, C, G).

190. The dsRNA of claim 136, wherein the sense strand is Sense Oligo No: 656.

191. The dsRNA of claim 136, wherein the sense strand is Sense Oligo No: 636.

192. The dsRNA of claim 136, wherein the sense strand Sense Oligo No: 364.

193. The dsRNA of claim 136, wherein the sense strand is Sense Oligo No: 648.

194. The dsRNA of claim 136, wherein the sense strand is Sense Oligo No: 1366.

195. The dsRNA of claim 136, wherein the sense strand is Sense Oligo No: 550.

196. The dsRNA of claim 136, wherein the sense strand Sense Oligo No: 1874.

197. The dsRNA of claim 136, wherein the sense strand Sense Oligo No: 1302.

198. The dsRNA of claim 136, wherein the sense strand is Sense Oligo No: 420.

199. The dsRNA of claim 135, wherein the sense strand Sense Oligo No: 672.

200. The dsRNA of claim 136, wherein the sense strand is Sense Oligo No: 832.

201. The dsRNA of claim 148, wherein the antisense strand is Antisense Oligo No: 649, wherein the 5′ nucleotide represented by U can be any nucleotide (e.g., U, A, C, G).

202. The dsRNA of claim 148, wherein the antisense strand is Antisense Oligo No: 657, wherein the 5′ nucleotide represented by U can be any nucleotide (e.g., U, A, C, G).

203. The dsRNA of claim 148, wherein the antisense strand is Antisense Oligo No: 637, wherein the 5′ nucleotide represented by U can be any nucleotide (e.g., U, A, C, G).

204. The dsRNA of claim 148, wherein the antisense strand is Antisense Oligo No: 365, wherein the 5′ nucleotide represented by U can be any nucleotide (e.g., U, A, C, G).

205. The dsRNA of claim 148, wherein the antisense strand is Antisense Oligo No: 1367, wherein the 5′ nucleotide represented by U can be any nucleotide (e.g., U, A, C, G).

206. The dsRNA of claim 148, wherein the antisense strand is Antisense Oligo No: 551, wherein the 5′ nucleotide represented by U can be any nucleotide (e.g., U, A, C, G).

207. The dsRNA of claim 148, wherein the antisense strand is Antisense Oligo No: 1875, wherein the 5′ nucleotide represented by U can be any nucleotide (e.g., U, A, C, G).

208. The dsRNA of claim 148, wherein the antisense strand is Antisense Oligo No: 1303, wherein the 5′ nucleotide represented by U can be any nucleotide (e.g., U, A, C, G).

209. The dsRNA of claim 148, wherein the antisense strand is Antisense Oligo No: 421, wherein the 5′ nucleotide represented by U can be any nucleotide (e.g., U, A, C, G).

210. The dsRNA of claim 148, wherein the antisense strand is Antisense Oligo No: 673, wherein the 5′ nucleotide represented by U can be any nucleotide (e.g., U, A, C, G).

211. The dsRNA of claim 148, wherein the antisense strand is Antisense Oligo No, wherein the 5′ nucleotide represented by U can be any nucleotide (e.g., U, A, C, G).

212. The dsRNA of any one of claims 110-210, wherein the dsRNA exhibits at least 50% mRNA inhibition at a 10 nM dsRNA concentration when determined using a cell assay compared with a control cell.

213. The dsRNA of any one of claims 110-210, wherein the dsRNA exhibits at least 60% mRNA inhibition at a 10 nM dsRNA concentration when determined using a cell assay compared with a control cell.

214. The dsRNA of any one of claims 110-210, wherein the dsRNA exhibits at least 70% mRNA inhibition at a 10 nM dsRNA concentration when determined using a cell assay when compared with a control cell.

215. The dsRNA of any one of claims 110-210, wherein the sense strand is complementary to at least 17 contiguous nucleotides of an MSH3 gene.

216. The dsRNA of any one of claims 110-210, wherein the sense strand is complementary to at least 19 contiguous nucleotides of an MSH3 gene.

217. The dsRNA of any one of claims 110-210, wherein the antisense strand is complementary to 17 contiguous nucleotides of an MSH3 gene.

218. The dsRNA of any one of claims 110-210, wherein the antisense strand is complementary to at least 19 contiguous nucleotides of an MSH3 gene.

219. The dsRNA of any one of claims 110-210, wherein the antisense strand and/or the sense strand comprises a 3′ overhang of at least 1 linked nucleoside; or a 3′ overhang of at least 2 linked nucleosides.

220. A pharmaceutical composition comprising one or more dsRNAs of any one of claims 110-219 and a pharmaceutically acceptable carrier.

221. A composition comprising one or more dsRNAs of any one of claims 110-219 and a lipid nanoparticle, a polyplex nanoparticle, a lipoplex nanoparticle, or a liposome.

222. A vector encoding at least one strand of the dsRNA of any one of claims 110-219.

223. A cell comprising the vector of claim 222.

224. A method of reducing transcription of MSH3 in a cell, the method comprising contacting the cell with the dsRNA of any one of claims 110-219, the pharmaceutical composition of claim 220, the composition of claim 221, the vector of claim 222, or the cell of claim 223 for a time sufficient to obtain degradation of an mRNA transcript of MSH3, thereby reducing expression of MSH3 in the cell.

225. A method of treating, preventing, or delaying progression of a nucleotide repeat expansion disorder in a subject in need thereof, the method comprising administering to the subject the dsRNA of any one of claims 110-219, the pharmaceutical composition of claim 220, the composition of claim 221, the vector of claim 222, or the cell of claim 223.

226. A method of reducing the level and/or activity of MSH3 in a cell of a subject identified as having a nucleotide repeat expansion disorder, the method comprising contacting the cell with the dsRNA of any one of claims of any one of claims 110-219, the pharmaceutical composition of claim 220, the composition of claim 221, the vector of claim 222, or the cell of claim 223.

227. A method for reducing expression of MSH3 in a cell comprising contacting the cell with the dsRNA of any one of claims of any one of claims 110-219, the pharmaceutical composition of claim 220, the composition of claim 221, the vector of claim 222, or the cell of claim 223 and maintaining the cell for a time sufficient to obtain degradation of an mRNA transcript of MSH3, thereby reducing expression of MSH3 in the cell.

228. A method of decreasing nucleotide repeat expansion in a cell, the method comprising contacting the cell with the dsRNA of any one of claims of any one of claims 110-219, the pharmaceutical composition of claim 220, the composition of claim 221, the vector of claim 222, or the cell of claim 223.

229. The method of any one of claims 224-228, wherein the cell is in a subject.

230. The method of any one of claims 224-229, wherein the subject is a human.

231. The method of any one of claims 224-230, wherein the cell is a cell of the central nervous system or a muscle cell

232. The method of any one of claim 225-226 or 229-231, wherein the subject is identified as having a nucleotide repeat expansion disorder.

233. The method of any one of claims claim 232, wherein the subject is identified as having a trinucleotide repeat expansion disorder.

234. The method of claim 233, wherein the trinucleotide repeat expansion disorder is a polyglutamine disease.

235. The method of claim 234, wherein the polyglutamine disease is selected from the group consisting of dentatorubropallidoluysian atrophy, Huntington's disease, spinal and bulbar muscular atrophy, spinocerebellar ataxia type 1, spinocerebellar ataxia type 2, spinocerebellar ataxia type 3, spinocerebellar ataxia type 6, spinocerebellar ataxia type 7, spinocerebellar ataxia type 17, and Huntington's disease-like 2.

236. The method of claim 233, wherein the trinucleotide repeat expansion disorder is a non-polyglutamine disease.

237. The method of claim 236, wherein the non-polyglutamine disease is selected from the group consisting of fragile X syndrome, fragile X-associated tremor/ataxia syndrome, fragile XE mental retardation, Friedreich's ataxia, myotonic dystrophy type 1, spinocerebellar ataxia type 8, spinocerebellar ataxia type 12, oculopharyngeal muscular dystrophy, Fragile X-associated premature ovarian failure, FRA2A syndrome, FRA7A syndrome, and early infantile epileptic encephalopathy.

238. A dsRNA of any one of claims of any one of claims 110-219, the pharmaceutical composition of claim 220, the composition of claim 221, the vector of claim 222, or the cell of claim 223, for use in prevention or treatment of a nucleotide repeat expansion disorder.

239. The dsRNA of claim 238, wherein the nucleotide repeat expansion disorder is a trinucleotide repeat expansion disorder.

240. The dsRNA, the pharmaceutical composition, the composition, the vector, or the cell of claim 238 or 239, wherein the nucleotide repeat expansion disorder is selected from the group consisting of dentatorubropallidoluysian atrophy, Huntington's disease, spinal and bulbar muscular atrophy, spinocerebellar ataxia type 1, spinocerebellar ataxia type 2, spinocerebellar ataxia type 3, spinocerebellar ataxia type 6, spinocerebellar ataxia type 7, spinocerebellar ataxia type 17, Huntington's disease-like 2, fragile X syndrome, fragile X-associated tremor/ataxia syndrome, fragile XE mental retardation, Friedreich's ataxia, myotonic dystrophy type 1, spinocerebellar ataxia type 8, spinocerebellar ataxia type 12, oculopharyngeal muscular dystrophy, Fragile X-associated premature ovarian failure, FRA2A syndrome, FRA7A syndrome, and early infantile epileptic encephalopathy.

241. The dsRNA, the pharmaceutical composition, the composition, the vector, or the cell of claim 238 or 239, wherein the trinucleotide repeat expansion disorder is Huntington's disease.

242. The dsRNA, the pharmaceutical composition, the composition, the vector, or the cell of claim 238 or 239, wherein the trinucleotide repeat expansion disorder is Friedreich's ataxia.

243. The dsRNA, the pharmaceutical composition, the composition, the vector, or the cell of claim 238 or 239, wherein the trinucleotide repeat expansion disorder is myotonic dystrophy type 1.

244. The dsRNA, the pharmaceutical composition, the composition, the vector, or the cell of any of claim 238 or 239, wherein the dsRNA, pharmaceutical composition, composition, vector, or cell is administered intrathecally.

245. The dsRNA, the pharmaceutical composition, the composition, the vector, or the cell of any of claim 238 or 239, wherein the dsRNA, pharmaceutical composition, composition, vector, or cell is administered intraventricularly.

246. The dsRNA, the pharmaceutical composition, the composition, the vector, or the cell of any of claim 238 or 239, wherein the dsRNA, pharmaceutical composition, composition, vector, or cell is administered intramuscularly.

247. The dsRNA, the pharmaceutical composition, the composition, the vector, or the cell of any of claim 238 or 239, wherein the dsRNA, pharmaceutical composition, composition, vector, or cell is administered intracerebroventricularly.

248. The dsRNA, the pharmaceutical composition, the composition, the vector, or the cell of any of claim 238 or 239, wherein the dsRNA, pharmaceutical composition, composition, vector, or cell is administered intraocularly.

249. A method of treating, preventing, or delaying progression of a disorder in a subject in need thereof wherein the subject is suffering from trinucleotide repeat expansion disorder, comprising administering to said subject the dsRNA of any one of any one of claims 110-219, the pharmaceutical composition of claim 220, the composition of claim 221, the vector of claim 222, or the cell of claim 223.

250. The method of claim 249, further comprising administering at least one additional therapeutic agent.

251. The method of claim 250, wherein at least one additional therapeutic agent is an antisense oligonucleotide that hybridizes to an mRNA encoding the Huntingtin gene.

252. A method of preventing or delaying progression of a trinucleotide repeat expansion disorder in a subject, the method comprising administering to the subject the dsRNA of any one of claims 110-219, the pharmaceutical composition of claim 220, the composition of claim 221, the vector of claim 222, or the cell of claim 223 in an amount effective to delay progression of a nucleotide repeat expansion disorder of the subject

253. The method of claim 252, wherein the nucleotide repeat expansion disorder is a trinucleotide repeat expansion disorder.

254. The method of claim 253, wherein the trinucleotide repeat expansion disorder is selected from the group consisting of dentatorubropallidoluysian atrophy, Huntington's disease, spinal and bulbar muscular atrophy, spinocerebellar ataxia type 1, spinocerebellar ataxia type 2, spinocerebellar ataxia type 3, spinocerebellar ataxia type 6, spinocerebellar ataxia type 7, spinocerebellar ataxia type 17, Huntington's disease-like 2, fragile X syndrome, fragile X-associated tremor/ataxia syndrome, fragile XE mental retardation, Friedreich's ataxia, myotonic dystrophy type 1, spinocerebellar ataxia type 8, spinocerebellar ataxia type 12, oculopharyngeal muscular dystrophy, Fragile X-associated premature ovarian failure, FRA2A syndrome, FRA7A syndrome, and early infantile epileptic encephalopathy.

255. The method of claim 253 or 254, wherein the trinucleotide repeat expansion disorder is Huntington's disease.

256. The method of claim 253 or 254, wherein the trinucleotide repeat expansion disorder is Friedrich's ataxia.

257. The method of claim 253 or 254, wherein the trinucleotide repeat expansion disorder is myotonic dystrophy type 1.

258. The method of claim 253 or 254, wherein the trinucleotide repeat expansion disorder is a Spinocerebellar ataxia (SCA).

259. The method of claim 258, wherein the SCA is Spinocerebellar ataxia type 1 (SCA1)

260. The method of claim 258, wherein the SCA is Spinocerebellar ataxia type 10 (SCA10).

261. The method of claim 258, wherein the SCA is Spinocerebellar ataxia type 12 (SCA12).

262. The method of claim 258, wherein the SCA is Spinocerebellar ataxia type 17 (SCA17).

263. The method of claim 258, wherein the SCA is Spinocerebellar ataxia type 2 (SCA2).

264. The method of claim 258, wherein the SCA is Spinocerebellar ataxia type 3 (SCA3)/Machado-Joseph Disease.

265. The method of claim 258, wherein the SCA is Spinocerebellar ataxia type 45 (SCA45).

266. The method of claim 258, wherein the SCA is Spinocerebellar ataxia type 6 (SCA6).

267. The method of claim 258, wherein the SCA is Spinocerebellar ataxia type 7 (SCAT).

268. The method of claim 258, wherein the SCA is Spinocerebellar ataxia type 8 (SCAB).

269. The method of any of claims 249-268, further comprising administering at least one additional therapeutic agent.

270. The method of claim 269, wherein at least one additional therapeutic agent is an antisense oligonucleotide that hybridizes to an mRNA encoding the Huntingtin gene.

271. The method of any of claims 249-270, wherein progression of the trinucleotide repeat expansion disorder is delayed by at least 120 days, for example, at least 6 months, at least 12 months, at least 2 years, at least 3 years, at least 4 years, at least 5 years, at least 10 years or more, when compared with a predicted progression.

272. A dsRNA of any one of claims 110-219, the pharmaceutical composition of claim 220, the composition of claim 221, the vector of claim 222, or the cell of claim 223, for use in preventing or delaying progression of a nucleotide repeat expansion disorder in a subject

273. The dsRNA of claim 272, wherein the nucleotide repeat expansion disorder is a trinucleotide repeat expansion disorder.

274. The dsRNA, the pharmaceutical composition, the composition, the vector, or the cell for use of claim 272 or 273, wherein the trinucleotide repeat expansion disorder is selected from the group consisting of dentatorubropallidoluysian atrophy, Huntington's disease, spinal and bulbar muscular atrophy, spinocerebellar ataxia type 1, spinocerebellar ataxia type 2, spinocerebellar ataxia type 3, spinocerebellar ataxia type 6, spinocerebellar ataxia type 7, spinocerebellar ataxia type 17, Huntington's disease-like 2, fragile X syndrome, fragile X-associated tremor/ataxia syndrome, fragile XE mental retardation, Friedreich's ataxia, myotonic dystrophy type 1, spinocerebellar ataxia type 8, spinocerebellar ataxia type 12, oculopharyngeal muscular dystrophy, Fragile X-associated premature ovarian failure, FRA2A syndrome, FRA7A syndrome, and early infantile epileptic encephalopathy.

275. The dsRNA, the pharmaceutical composition, the composition, the vector, or the cell of claim 273 or 274, wherein the trinucleotide repeat expansion disorder is Huntington's disease.

276. The dsRNA, the pharmaceutical composition, the composition, the vector, or the cell of claim 273 or 274, wherein the trinucleotide repeat expansion disorder is Friedrich's ataxia.

277. The dsRNA, the pharmaceutical composition, the composition, the vector, or the cell of claim 273 or 274, wherein the trinucleotide repeat expansion disorder is myotonic dystrophy type 1

278. The dsRNA, the pharmaceutical composition, the composition, the vector, or the cell of claim 273 or 274, wherein the trinucleotide repeat expansion disorder is a Spinocerebellar ataxia (SCA).

279. The dsRNA of claim 278, wherein the SCA is Spinocerebellar ataxia type 1 (SCA1).

280. The dsRNA of claim 278, wherein the SCA is Spinocerebellar ataxia type 10 (SCA10).

281. The dsRNA of claim 278, wherein the SCA is Spinocerebellar ataxia type 12 (SCA12).

282. The dsRNA of claim 278, wherein the SCA is Spinocerebellar ataxia type 17 (SCA17).

283. The dsRNA of claim 278, wherein the SCA is Spinocerebellar ataxia type 2 (SCA2).

284. The dsRNA of claim 278, wherein the SCA is Spinocerebellar ataxia type 3 (SCA3)/Machado-Joseph Disease.

285. The dsRNA of claim 278, wherein the SCA is Spinocerebellar ataxia type 45 (SCA45).

286. The dsRNA of claim 278, wherein the SCA is Spinocerebellar ataxia type 6 (SCA6).

287. The dsRNA of claim 278, wherein the SCA is Spinocerebellar ataxia type 7 (SCAT).

288. The dsRNA of claim 278, wherein the SCA is Spinocerebellar ataxia type 8 (SCAB).

289. The dsRNA, the pharmaceutical composition, the composition, the vector, or the cell of any one of claims 272-288, wherein progression of the trinucleotide repeat expansion disorder is delayed by at least 120 days, for example, at least 6 months, at least 12 months, at least 2 years, at least 3 years, at least 4 years, at least 5 years, at least 10 years or more, when compared with a predicted progression.
